(19) United States
(12) Patent Application Publication
(10) Pub. No.: US 2017/0088607 A1
(43) Pub. Date: Mar. 30, 2017

(54) PVRIG POLYPEPTIDES AND METHODS OF TREATMENT

(71) Applicant: Compugen Ltd., Holon (IL)

(72) Inventors: Mark White, Antioch, CA (US); Sandeep Kumar, San Bruno, CA (US); Christopher Chan, South San Francisco, CA (US); Spencer Liang, San Mateo, CA (US); Lance Stapleton, Oakland, CA (US); Andrew W. Drake, Mountain View, CA (US); Yosi Gozlan, Tel Aviv (IL); Ilan Vaknin, Tel Aviv (IL); Shirley Sameah-Greenwald, Kfar Saba (IL); Liat Dassa, Tel Aviv (IL); Zohar Tiran, Oranit (IL); Gad. S. Cojocaru, Tel Aviv (IL); Amir Toporik, Binyamina (IL); Yossef Kliger, Rishon Le Zion (IL); Ofer Levy, Moshav Mesilat Zion Doar Na Shimson (IL); Arthur Machlenkin, Tel Aviv (IL); Sergey Nemzer, Ranaana (IL); Yair Benita, Tel Aviv (IL); Amit Novik, Binyamina (IL)

(21) Appl. No.: 15/048,975

(22) Filed: Feb. 19, 2016

Related U.S. Application Data
(60) Provisional application No. 62/118,235, filed on Feb. 19, 2015.
(60) Provisional application No. 62/141,168, filed on Mar. 31, 2015.

(51) Int. Cl. C07K 16/10; G01N 33/50

(52) U.S. Cl. CPC C07K 16/1009; G01N 33/505; G01N 33/502; C07K 2319/30; G01N 2500/10; G01N 2333/70596

(57) ABSTRACT

The present invention is directed to PVRIG polypeptides and their uses.

### CROSS REFERENCE TO RELATED APPLICATIONS

[0001] This application claims priority under 35 U.S.C. §119 to U.S. Ser. No. 62/118,235, filed Feb. 19, 2015, and to U.S. Ser. No. 62/141,168, filed Mar. 31, 2015, both of which are expressly incorporated herein by reference in their entirety.

### SEQUENCE LISTING

[0002] The instant application contains a Sequence Listing which has been submitted electronically in ASCII format and is hereby incorporated by reference in its entirety. Said ASCII copy, created on Apr. 13, 2016, is named 114386-5003-US SL.txt and is 910,355 bytes in size.

### BACKGROUND OF THE INVENTION

[0003] Naïve T cells must receive two independent signals from antigen-presenting cells (APC) in order to become productively activated. The first, Signal 1, is antigen-specific and occurs when T cell antigen receptors encounter the appropriate antigen-MHC complex on the APC. The fate of the immune response is determined by a second, antigen-independent signal (Signal 2) which is delivered through a T cell costimulatory molecule that engages its APC-expressed ligand. This second signal could be either stimulatory (positive costimulation) or inhibitory (negative costimulation or coinhibition). In the absence of a costimulatory signal, or in the presence of a coinhibitory signal, T-cell activation is impaired or aborted, which may lead to a state of antigen-specific unresponsiveness (known as T-cell anergy), or may result in T-cell apoptotic death.

[0004] Costimulatory molecule pairs usually consist of ligands expressed on APCs and their cognate receptors expressed on T cells. The prototype ligand/receptor pairs of costimulatory molecules are B7/CD28 and CD40/CD40L. The B7 family consists of structurally related, cell-surface protein ligands, which may provide stimulatory or inhibitory input to an immune response. Members of the B7 family are structurally related, with the extracellular domain containing at least one variable or constant immunoglobulin domain.

[0005] Both positive and negative costimulatory signals play critical roles in the regulation of cell-mediated immune responses, and molecules that mediate these signals have proven to be effective targets for immunomodulation. Based on this knowledge, several therapeutic approaches that involve targeting of costimulatory molecules have been developed, and were shown to be useful for prevention and treatment of cancer by turning on, or preventing the turning off, of immune responses in cancer patients and for prevention and treatment of autoimmune diseases and inflammatory diseases, as well as rejection of allogenic transplantation, each by turning off uncontrolled immune responses, or by induction of “off signal” by negative costimulation (or coinhibition) in subjects with these pathological conditions.

[0006] Manipulation of the signals delivered by B7 ligands has shown potential in the treatment of autoimmunity, inflammatory diseases, and transplant rejection. Therapeutic strategies include blocking of costimulation using monoclonal antibodies to the ligand or to the receptor of a costimulatory pair, or using soluble fusion proteins composed of the costimulatory receptor that may bind and block its appropriate ligand. Another approach is induction of co-inhibition using soluble fusion protein of an inhibitory ligand. These approaches rely, at least partially, on the eventual deletion of auto- or allo-reactive T cells (which are responsible for the pathogenic processes in autoimmune diseases or transplantation, respectively), presumably because in the absence of costimulation (which induces cell survival genes) T cells become highly susceptible to induction of apoptosis. Thus, novel agents that are capable of modulating costimulatory signals, without compromising the immune system's ability to defend against pathogens, are highly advantageous for treatment and prevention of such pathological conditions.

[0007] Costimulatory pathways play an important role in tumor development. Interestingly, tumors have been shown to evade immune destruction by impeding T cell activation through inhibition of co-stimulatory factors in the B7-CD28 and TNF families, as well as by attracting regulatory T cells, which inhibit anti-tumor T cell responses (see Wang (2006), “Immune Suppression by Tumor Specific CD4⁺ Regulatory T cells in Cancer”, Semin. Cancer. Biol. 16:73-79; Greenwald, et al. (2005), “The B7 Family Revisited”, Ann. Rev. Immunol. 23:515-48; Watts (2005), “TNF/TNFR Family Members in Co-stimulation of T Cell Responses”, Ann. Rev. Immunol. 23:23-68; Sadum, et al., (2007) “Immune Signatures of Murine and Human Cancers Reveal Unique Mechanisms of Tumor Escape and New Targets for Cancer Immunotherapy”, Clin. Canc. Res. 13(13): 4016-4025). Such tumor expressed co-stimulatory molecules have become attractive cancer biomarkers and may serve as tumor-associated antigens (TAAs). Furthermore, costimulatory pathways have been identified as immunologic checkpoints that attenuate T cell dependent immune responses, both at the level of initiation and effector function within tumor metastases. As engineered cancer vaccines continue to improve, it is becoming clear that such immunologic checkpoints are a major barrier to the vaccines' ability to induce therapeutic anti-tumor responses. In that regard, costimulatory molecules can serve as adjuvants for active (vaccination) and passive (antibody-mediated) cancer immunotherapy, providing strategies to thwart immune tolerance and stimulate the immune system.

[0008] Over the past decade, agonists and/or antagonists to various costimulatory proteins have been developed for treating autoimmune diseases, graft rejection, allergy and cancer. For example, CTLA4-Ig (Abatacept, Orencia®) is approved for treatment of RA, mutated CTLA4-Ig (Belatacept, Nulojix®) for prevention of acute kidney transplant rejection and by the anti-CTLA4 antibody (Ipilimumab, Yervoy®), recently approved for the treatment of melanoma.

[0009] Accordingly, there is a need for additional agonists and antagonists of immune checkpoint pathways.

### BRIEF SUMMARY OF THE INVENTION

[0010] The present invention provides methods of screening for inhibitors of the binding association of PVRIG polypeptide with PVLR2, the method comprising: a) providing a surface comprising a first ligand protein comprising one of PVRIG polypeptide or PVLR2 polypeptide; b) contacting said surface with a candidate agent under physiological conditions, wherein if said candidate agent binds to said first ligand protein it forms a first binding complex; c) contacting said surface with a second ligand protein comprising the other of PVRIG polypeptide or PVLR2; and d) determining whether said PVRIG polypeptide and said PVLR2 are bound as an indication of whether said candidate agent inhibits said binding association.

[0011] In a further aspect, the present invention provides methods of screening for inhibitors of the binding association of PVRIG polypeptide with PVLR2, said method comprising: a) providing a cell comprising an exogeneous recombinant nucleic acid encoding a human PVRIG polypeptide, wherein said cell expresses said human PVRIG polypeptide; b) contacting said cell with a candidate agent and a labeled PVRL2 polypeptide; c) determining whether said PVRIG polypeptide binds to PVLR2 as an indication of whether said candidate agent inhibits the binding of PVRIG polypeptide with PVLR2.

[0012] In an additional aspect, the present invention provides methods of screening for inhibitors of the binding association of PVRIG polypeptide with PVLR2, said method comprising: a) providing a cell comprising an exogeneous recombinant nucleic acid encoding a human PVLR2 polypeptide, wherein said cell expresses said human PVLR2 polypeptide; b) contacting said cell with a candidate agent and a labeled PVRIG polypeptide; c) determining whether said PVLR2 polypeptide binds to PVRIG as an indication of whether said candidate agent inhibits the binding of PVRIG polypeptide with PVLR2.

[0013] In a further aspect, the invention provides methods of screening for inhibitors of the binding association of PVRIG polypeptide with PVLR2, said method comprising: a) providing a test solution comprising: i) a PVRIG polypeptide comprising a first FRET label; ii) a PVLR2 polypeptide comprising a second FRET label; c) providing a candidate agent; and d) detecting a FRET signal between said first and second label, wherein a difference in said FRET signal in the presence or absence of said candidate agent indicates that the candidate agent inhibits said binding association.

[0014] In an additional aspect, the invention provides methods as above wherein a plurality and/or a library of candidate agents are tested. The candidate agents can be proteins, including anti-PVRIG antibodies and/or proteins comprising a wild type or variant extracellular domain (ECD) of PVRIG. In some methods the proteins are fusion proteins comprising the ECD and a fusion partner, and the fusion partner can be a human IgG Fc domain or a human serum albumin (HSA).

[0015] In a further aspect, the methods above can further comprise contacting a candidate agent that has the first activity with a population of cytotoxic T cells (CTLs) under conditions wherein said CTLs would normally be activated; and b) determining the effect of said agent on said activation.

[0016] In a further aspect, the methods above can further comprise contacting a candidate agent that has the first activity with a population of cytotoxic T cells (CTLs); and b) determining the effect of said agent on IFNγ production.

[0017] In an addition aspect, the methods above can further comprise contacting the candidate agent with a population of γδ T cells under conditions wherein said γδ T cells would normally be activated; and b) determining the effect of said agent on said activation.

[0018] In a further aspect, the methods above can further comprise contacting the candidate agent that has the first activity with a population of Th1 cells under conditions wherein said Th1 cells would normally be activated; and b) determining the effect of said agent on said activation.

[0019] In an additional aspect, the methods above can further comprise contacting said candidate agent with a population of regulatory T cells (Tregs) under conditions and determining the effect of said agent on Treg cell number or activity.

[0020] In a further aspect, the methods above determine efficacy by measuring the presence or absence of increased expression of a protein selected from the group consisting of IFNg, TNFα, GM-CSF, CD25, CD137, CD69, PD1, CD107A, HLA-DR, IL-2, IL-6, IL-4, IL-5, IL-10 and IL-13, wherein increased expression is an indication of activation.

[0021] The invention further provides methods of treating a disorder associated with the interaction of PVRIG and PVLR2 comprising administering to a patient a composition comprising a stimulator of PVRIG to effect treatment. The treatment that occurs can be one or more of a decrease in immune response, a decrease in activation of αβ and/or γδ T cells, a decrease in cytotoxic T cell activity, a decrease in NK and/or NKT cell activity, a decrease of αβ and/or γδ T-cell activity, a decrease in pro-inflammatory cytokine secretion; a decrease in IL-2 secretion, a decrease in interferon-γ production, a decrease in Th1 response, a increase in Th2 response, an increase in inhibition of T cell activity, an increase in inhibition of CTL activity, an increase in inhibition of NK cell activity, an increase in αβ and/or γδ T cell exhaustion, a decrease in αβ and/or γδ T cell response, a decrease in activity of cytotoxic cells, a reduction in antigen-specific memory responses, an inhibition of apoptosis or lysis of cells, a decrease in cytotoxic or cytostatic effect on cells, a reduction in direct killing of cells, a decreases in Th17 activity, an reduction of complement dependent cytotoxicity and/or antibody dependent cell-mediated cytotoxicity.

[0022] In a further aspect in the methods above, the stimulator can be a protein or a nucleic acid. In some cases, the protein comprises an extracellular domain (ECD) of PVRIG. In some cases, the protein is a fusion protein comprising said ECD and a fusion partner. The fusion partner can be selected from the group consisting of a human IgG Fc domain and a human serum albumin (HSA).

[0023] In an additional aspect, the patient to whom the stimulator is administered has an immune disorder, which can be selected from the group consisting of an autoimmune disease, organ transplant rejection and inflammation. The autoimmune disease is selected from the group consisting of rheumatoid arthritis, lupus, Inflammatory bowel disease, psoriasis, multiple sclerosis and diabetes type I.

[0024] In further aspects, the invention provides composition comprising an isolated PVRIG polypeptide consisting of a PVRIG polypeptide ECD domain having at least 95% identity to the ECD domain of an amino acid sequence selected from the group consisting of the sequences depicted in FIG. 67, FIG. 91 and FIGS. 92A to 92AT. In some cases, the isolated PVRIG polypeptide has at least 99% identity to an amino acid sequence selected from the group consisting of the sequences depicted in FIG. 67, FIG. 91 and FIGS. 92A to 92AT. In some embodiments they have 100% identity.

[0025] In a further aspect, the invention provides compositions comprising a PVRIG fusion polypeptide comprising: a) an ECD from a PVRIG polypeptide; and b) a covalently attached fusion partner moiety. The fusion partner can be selected from the group consisting of a human IgG Fc domain, a human serum albumin (HSA) and a polyethylene glycol (PEG). In some cases, the ECD from the fusion partner can have 95%-99%-100% identity to the sequences depicted in FIG. 67, FIG. 91 and FIGS. 92A to 92AT.

[0026] In an additional aspect, the PVRIG polypeptide and the fusion partner moiety are directly covalently attached. In some cases, the fusion partner moiety is a polyethylene glycol (PEG) moiety.

[0027] In a further aspect, the PVRIG polypeptide and said fusion partner moiety are covalently attached using an exogeneous linker. In some cases, the exogeneous linker is selected from the group consisting of those depicted in FIGS. 93A-93C or has the formula (GGGS)n, wherein n is from 1 to 5.

[0028] In a further aspect, the fusion partner moiety is either a human serum albumin (HSA) or an Fc domain. In the latter case, the Fc domain is a human IgG Fc domain, selected from the group consisting of the Fc domain of human IgG1, the Fc domain of human IgG2, the Fc domain of human IgG3 and the Fc domain of human IgG4. In some cases, the Fc domain is a variant human Fc domain from IgG1 or IgG2.

[0029] In an additional aspect, the compositions further comprise a pharmaceutically acceptable carrier.

[0030] In a further aspect, the invention provides methods of treatment using the compositions above to a patient, such that said patient's immune response is suppressed as a result of treatment. In some cases, the patient has an immune disorder. In some cases, the immune disorder is selected from the group consisting of an autoimmune disease, and organ transplant rejection. In some cases, the autoimmune disease is selected from the group consisting of rheumatoid arthritis, lupus, Inflammatory bowel disease, psoriasis, multiple sclerosis, Diabetes type I.

### BRIEF DESCRIPTION OF THE DRAWINGS

[0031] FIG. 1 Schematic presentation of the mechanisms of action of the invention.

[0032] FIG. 2 presents mRNA Expression of PVRIG in various normal human tissues.

[0033] FIG. 3 presents mRNA expression of PVRIG in various immune population derived from peripheral blood and bone marrow (based on GSE49910).

[0034] FIG. 4 presents mRNA expression of PVRIG in various CD3+ lymphocyte population (based on GSE47855).

[0035] FIGS. 5A, 5B and 5C presents mRNA expression of PVRIG in specific cell populations. FIG. 5A resents mRNA expression of PVRIG in specific cell populations obtained by laser capture microscopy (based on GSE39397). FIG. 5B presents mRNA expression of PVRIG in CD4 T-cells from normal and cancer patient as well as expression form CD4 T-cell expression from draining lymph nodes and TILs form breast cancer patients (based on GSE36765). FIG. 5C presents mRNA expression of PVRIG from CD8 and CD4 T-cells derived from follicular lymphoma tumor and tonsil (based on GSE27928).

[0036] FIG. 6 presents PVRIG expression in normal tissues based on GTEx. Expression levels are shown in log 2(RPKM) values (fragments identified per million reads per kilobase). Values above 1 are considered high expression. Tissues are ranked from top to bottom by the median expression. Each dot on the plot represent a single sample.

[0037] FIG. 7 presents PVRIG expression in cancerous tissues based on TCGA. Expression levels are shown in log 2(RPKM) values (fragments identified per million reads per kilobase). Values above 1 are considered high expression. Tissues are ranked from top to bottom by the median expression. Each dot on the plot represent a single sample.

[0038] FIG. 8 shows a heatmap representation of the enrichment analysis results in three categories: protein interactions, pathways and disease associations. Results are ranked from top to bottom by average p-value per row. Only the top 10 results from each category are shown. Gray squares indicate p-values<0.05. Each column in the heatmap corresponds to a normal or cancer tissue from which a list of highly correlated genes was derived (r>0.55 using at least 50 samples). As shown in the heatmap, PVRIG correlates with a T cell gene expression signature which is strongly associated with the immune response and immune diseases.

[0039] FIG. 9 presents PVRIG expression in normal skin vs. melanoma (GTEx and TCGA analysis). Such over-expression was observed in additional solid tumors and results from infiltrating lymphocytes and NK cells in the tumor microenvironment. In normal conditions, no infiltrating immune cells are present and therefore PVRIG expression levels are very low.

[0040] FIG. 10 presents the correlations of PVRIG and PD1 in melanoma from TCGA samples, with several T cell makers in lung adenocarcinoma, colon adenocarcinoma and melanoma. The marker CD3 is a general markers for T cells and is also expressed on NKT cells. CD4 and CD8 markers are used to characterized subpopulation of T cells.

[0041] FIG. 11 shows expression of PVRIG on human PBLs. Human PBLs derived from two donors were evaluated for PVRIG expression. Both donor 61 and donor 40 showed significant staining with anti-PVRIG specific Ab.

[0042] FIG. 12 shows PVRIG-Ig exhibits strong binding to all four human melanoma cell lines MEL-23, Mel-624 and Mel-624.38 and mel-888 tested. Binding is not affected by co-culture with engineered melanoma specific T cells. Grey line corresponds to isotype control, solid black line corresponds to PVRIG-ECD-Ig.

[0043] FIG. 13 Correlation of PVRIG with T cells and subpopulations of T cells. CD3G is component of the T cell receptor complex, CD4 is a maker for T helper cells and CD8A is component of CD8 protein used to identify cytotoxic T cells. PVRIG highly correlated with T cells in many types of tumors including lung adenocarcinoma, colon adenocarcinoma and melanoma which are shown here.

[0044] FIG. 14 presents representative images from the Confirmation/Specificity screen. All hits from the Primary screen, and EGFR-expressing vector (negative control), were re-arrayed/expressed in duplicate and probed with PVRIG at 20 μg/ml. A specific hit with strong intensity is shown in green (PVRL2). Non-specific hits are shown in black. Another weak hit (MAG) was later shown to bind also other ligands, thus suggesting that it is not specific.

[0045] FIGS. 15A-15E presents effect of various PVRIG-ECD-Ig M:M proteins on mouse CD4 T cell activation. Plates were coated with anti-CD3 mAb (2 μg/mL) in the presence of 10 μg/ml PVRIG-ECD Ig (batch #198) or control mIgG2a as described in materials and methods. Wells were plated with 1×10⁵ CD4+CD25− mouse T cells per well in the presence of 2 μg/ml of soluble anti-CD28. (A) The expression of CD69 was analyzed by flow cytometry at 48 h post-stimulation, representative histograms are shown. Each bar is the mean of duplicate cultures, the error bars indicating the standard deviation. (B-C) Culture supernatants were collected at 48 h post-stimulation and mouse IL-2 and IFNγ levels were analyzed by ELISA. Results are shown as Mean±Standard errors of duplicate samples. (D) Dose response effect of immobilized PVRIG-ECD Ig (FIG. 92BB on surface CD69 (D) and IFNγ secretion (E) is presented. Each bar is the mean of triplicate cultures, the error bars indicating the standard errors.

[0046] FIG. 16 presents FACS analysis on PVRIG transduced PBLs using a specific antibody. The percent of cells staining positive (relative to empty vector transduced) for the protein is provided.

[0047] FIG. 17 presents FACS analysis on PVRIG (either co-expressed with F4 TCR or in a bi-cystronic vector with F4 TCR and NGFR transduced PBLs using a specific antibody. The percent of cells staining positive (relative to empty vector transduced) for the protein is provided.

[0048] FIGS. 18A-18B presents FACS analysis performed on TCR transduced stimulated PBLs for experiment 1 (FIG. 18A) and in experiment 2 (FIG. 18B) using a specific monoclonal antibody that recognizes the extra-cellular domain of the beta-chain from the transduced specific TCR. The percentage of cells staining positive is provided.

[0049] FIG. 19 shows expression of PVRIG on F4 expressing PBLs causes a reduction of IFNγ secretion upon co-culture with SK-MEL23, MEL-624 and MEL-624.38 in comparison to expression of an empty vector.

[0050] FIGS. 20A-20B shows expression of PVRIG and F4 in PBLs by co-transduction (FIG. 20A) does not affect IFNγ secretion in co-culture with melanoma cell lines. Expression of PVRIG and F4 in PBLs using a bi-cystronic vector (FIG. 20B) causes a reduction of IFNγ secretion upon co-culture with SK-MEL23, MEL-624 and MEL-624.38 in comparison to expression of an empty vector.

[0051] FIG. 21 shows expression of PVRIG and F4 in PBLs using a bi-cystronic vector causes a reduction in T cell mediated cytotoxicity upon co-culture with melanoma cell lines.

[0052] FIG. 22 shows PVRIG expression in 3 subgroups of low, no change and high levels of exhausted T cells. Exhausted T cells were selected based on high level expression of 4 markers: CD8A, PD-1, TIM-3 and TIGIT. Low expressing samples are not shown since none had any detectable levels of PVRIG.

[0053] FIGS. 23A and 23B: Western blot analysis of ectopically expressed human PVRIG protein. Whole cell extracts of HEK293 cell pools, previously transfected with expression construct encoding human PVRIG-flag (lane 2) or with empty vector (lane 1) were analyzed by WB using an anti-flag antibody (23A) or anti-PVRIG antibodies (23B).

[0054] FIG. 24: Cell surface expression of HEK293 cells ectopically expressed human PVRIG-flag protein by FACS analysis. Anti-PVRIG pAb (Abnova) was used to analyze HEK293 cells stably expressing the human PVRIG-flag protein. Cells expressing the empty vector were used as negative control. Detection was carried out by Goat Anti-mouse PE-conjugated secondary Ab and analyzed by FACS.

[0055] FIG. 25 depicts the full length sequence of human PVRIG (showing two different methionine starting points) and the PVRIG Fc fusion protein used in the Examples. The signal peptide is underlined, the ECD is double underlined, and the Fc domain is the dotted underlining.

[0056] FIG. 26 depicts the sequence of the human Poliovirus receptor-related 2 protein (PVLR2, also known as nectin-2, CD112 or herpesvirus entry mediator B, (HVEB)), the binding partner of PVRIG as shown in Example 5. PVLR2 is a human plasma membrane glycoprotein.

[0057] FIG. 27 PVRIG antibody specificity towards HEK cells engineered to overexpress PVRIG. Data shows absolute geometric MFI (gMFI) measurements as a function of increasing antibody concentration. The broken black line with squares shows staining of HEK hPVRIG cells with a representative anti-human PVRIG antibody (CPA.7.021), and the solid black line with circles shows staining of HEK parental cells with the same antibody.

[0058] FIG. 28 PVRIG RNA was assessed in various cancer cell lines by qPCR. Data shown is relative expression of PVRIG RNA in cell lines as fold change over levels in expi cells as assessed by the 2^{(-ΔΔCt)} method.

[0059] FIG. 29 PVRIG RNA was assessed in sorted PBMC subsets by qPCR. Data shown is relative expression of PVRIG RNA in each subset as fold change over levels in HEK GFP cells as assessed by the 2^{(-ΔΔCt)} method. D47-D49 denote three individual donors. CD4 denotes CD4 T cells, CD8 denotes CD8 T cells, CD14 denotes monocytes, and CD56 denotes NK cells.

[0060] FIGS. 30A and 30B. FIG. 30A: PVRIG RNA was assessed in sorted CD4 T cells (CD4) and NK cells (NK) under naïve and activated conditions by qPCR. CD4 T cells were stimulated with human T cell stimulator dynabeads and 50 U/ml IL-2 for 3 days. NK cells were stimulated in 50 U/ml IL-2 for 3 days. Data shown is relative expression of PVRIG RNA in each subset as fold change over levels in expi cells as assessed by the 2^{(-ΔΔCt)} method. Jurkat is included as a positive control. D47-D49 denote three individual donors. FIG. 30B PVRIG RNA was assessed in sorted CD8 T cells under naïve and activated conditions by qPCR. CD8 T cells were stimulated with human T cell stimulator dynabeads and 100 U/ml IL-2 for 3 days. Data shown is relative expression of PVRIG RNA in each subset as fold change over levels in expi cells as assessed by the 2^{(-ΔΔCt)} method. Jurkat is included as a positive control. D49, 70, and 71 indicate three individual donors.

[0061] FIGS. 31A and 31B PVRIG binding characteristics to HEK hPVRIG engineered cell lines, HEK parental cells, CA46 cells, and Jurkat cells. HEK OE denotes HEK hPVRIG cells, HEK par denotes HEK parental cells. For Jurkat and CA46 data, gMFIr indicates the fold difference in geometric MFI of PVRIG antibody staining relative to their controls. Concentration indicates that at which the gMFIr was calculated. Not reliable fit indicates antibody binding characteristics do meet appropriate mathematical fitting requirements. Some antibodies were not tested in some conditions due to poor binding characteristics, specificity, or manufacturability.

[0062] FIGS. 32A-32B PVRIG binding characteristics to primary human PBMC, cyno transient over-expressing cells, and cyno primary PBMC. Expi cyno OE denotes expi cells transiently transfected with cPVRIG, expi par denotes expi parental cells. gMFIr indicates the fold difference in geometric MFI of PVRIG antibody staining relative to their controls. Concentration indicates that at which the gMFIr was calculated. Some antibodies were not tested in some conditions due to poor binding characteristics, specificity, or manufacturability as in FIGS. 31A-31B. Additionally, select antibodies were triaged for screening on cyno PBMC subsets based on their ability to bind cPVRIG transient cells or functionality. Expression of PVRIG on CD4 T cells is similar to that described in the table for CD8 T cells.

[0063] FIG. 33 PVRIG antibody specificity towards CA46 and Jurkat cells. Data shows absolute geometric MFI (gMFI) measurements by FACS as a function of increasing antibody concentration. The solid black line with triangles shows staining of CA46 cells with anti-human PVRIG antibody (CPA.7.021) and the solid black line with squares shows staining of Jurkat cells. OV-90 (broken line with upside down triangles) and NCI-H4411 (broken line with diamonds) are shown as negative controls.

[0064] FIGS. 34A-34D PVRIG antibody cross-reactivity towards cPVRIG transient cells. Data shows an example of an antibody that is a negative binder (a-b, CPA.7.021) and a positive binder (c-d, CPA.7.024) on cPVRIG transient cells. Solid grey histograms indicate control antibody, open black histograms indicate the antibody of interest. Cells were stained with each antibody at a concentration of 5 μg/ml.

[0065] FIG. 35 cPVRIG RNA was assessed in sorted cyno PBMC subsets by qPCR. Data shown is the average Ct values from three cyno donors as detected by two primer sets directed at two distinct areas of the cPVRIG gene.

[0066] FIGS. 36A-36C cPVRIG protein was assessed on a) CD16+ lymphocytes (NK cells), b) CD14+ CD56+ myeloid cells (monocytes), and c) CD3+ lymphocytes (T cells) by FACS. Data is shown as absolute geometric MFI, with the solid black line indicating background fluorescence levels. Data is representative of a sample of our panel of anti-human PVRIG antibodies tested in three cyno donors.

[0067] FIGS. 37A and 37B shows the CDR sequences for Fabs that were determined to successfully block interaction of the PVRIG with its counterpart PVRL2, as described in Example 5.

[0068] FIGS. 38A-38AA shows the amino acid sequences of the variable heavy and light domains, the full length heavy and light chains, and the variable heavy and variable light CDRs for the enumerated human CPA anti-PVRIG sequences of the invention that both bind PVRIG and block binding of PVRIG and PVLR2.

[0069] FIGS. 39A-39H depicts the amino acid sequences of the variable heavy and light domains, the full length heavy and light chains, and the variable heavy and variable light CDRs for eight human CPA anti-PVRIG sequences of the invention that bind PVRIG and but do not block binding of PVRIG and PVLR2.

[0070] FIGS. 40A-40D depicts the CDRs for all CPA anti-PVRIG antibody sequences that were generated that bind PVRIG, including those that do not block binding of PVRIG and PVLR2.

[0071] FIGS. 41A to 41DD depicts the variable heavy and light chains as well as the vhCDR1, vhCDR2, vhCDR3, v1CDR1, v1CDR2 and v1CDR3 sequences of each of the enumerated CHA antibodies of the invention, CHA.7.502, CHA.7.503, CHA.7.506, CHA.7.508, CHA.7.510, CHA.7.512, CHA.7.514, CHA.7.516, CHA.7.518, CHA.7.520.1, CHA.7.520.2, CHA.7.522, CHA.7.524, CHA.7.526, CHA.7.527, CHA.7.528, CHA.7.530, CHA.7.534, CHA.7.535, CHA.7.537, CHA.7.538.1, CHA.7.538.2, CHA.7.543, CHA.7.544, CHA.7.545, CHA.7.546, CHA.7.547, CHA.7.548, CHA.7.549 and CHA.7.550 (these include the variable heavy and light sequences from mouse sequences (from Hybridomas).

[0072] FIG. 42 depicts the binning results from Example 11. Not binned: CPA.7.029 and CPA.7.026 (no binding to the antigen).

[0073] FIG. 43 Binary matrix of pair-wise blocking (“0”, red box) or sandwiching (“1”, green box) of antigen for 35 anti-PVRIG mAbs. MAbs listed vertically on the left of the matrix are mAbs covalently immobilized to the ProteOn array. MAbs listed horizontally across the top of the matrix were analytes injected with pre-mixed antigen. Clone CPA.7.041 was studied only as an analyte. The black boxes outline four epitope bins according to the vertical blocking patterns of the mAbs.

[0074] FIG. 44 Hierarchical clustering dendrogram of the vertical binding patterns of each mAb in the binary matrix in FIG. 43. There are four bins of mAbs with identical epitope blocking patterns within each group. The only difference between bins 1 and 2 is mAbs in bin 1 block antigen binding to clone CPA.7.039 while mAbs in bin 2 can sandwich the antigen with CPA.7.039. Clone CPA.7.050 can sandwich the antigen with all other clones.

[0075] FIGS. 45A-45JJ Sensorgrams indicating the antigen blocking pattern for CPA.7.036 with all other immobilized mAbs, which are representative data for Bin #1. Each panel represents a different ProteOn chip array spot having a different immobilized mAb. Blue responses are antigen-only controls. Black responses are pre-mixed solutions of CPA.7.036 in molar excess of antigen. Gray responses are mAb-only control injections. CPA.7.36 blocks antigen binding to all other mAbs except for CPA.7.050 (JJ).

[0076] FIGS. 46A-46JJ Sensorgrams indicating the antigen blocking pattern for CPA.7.034 with all other immobilized mAbs, which are representative data for Bin #2. Each panel represents a different ProteOn chip array spot having a different immobilized mAb. Blue responses are antigen-only controls. Black responses are pre-mixed solutions of CPA.7.34 in molar excess of antigen. Gray responses are mAb-only control injections. CPA.7.34 blocks antigen binding to all other mAbs except for CPA.7.039 (DD) and CPA.7.050 (JJ).

[0077] FIGS. 47A-47JJ Sensorgrams indicating the antigen blocking pattern for CPA.7.039 with all other immobilized mAbs. CPA.7.039 is the only mAb in Bin #3. Each panel represents a different ProteOn chip array spot having a different immobilized mAb. Blue responses are antigen-only controls. Black responses are pre-mixed solutions of CPA.7.039 in molar excess of antigen. Gray responses are mAb-only control injections. Panels C, F, H, J, L, N, R, S, Z, EE, GG, HH, II, and JJ show sandwiching of the antigen.

[0078] FIGS. 48A-48JJ Sensorgrams indicating the antigen blocking pattern for CPA.7.050 with all other immobilized mAbs. CPA.7.050 is the only mAb in Bin #4. Each panel represents a different ProteOn chip array spot having a different immobilized mAb. Blue responses are antigen-only controls. Black responses are pre-mixed solutions of CPA.7.50 in molar excess of antigen. Gray responses are mAb-only control injections. Only panel JJ shows antigen blocking which is where CPA.7.050 was injected w/antigen over itself.

[0079] FIG. 49 show the results of the SPR experiments of Example 12.

[0080] FIGS. 50A-50Q SPR sensorgram data of multiple concentrations of anti PVRIG fabs in supernatant injected over captured human PVRIG fusion protein (black lines). The red lines show the 1:1 global kinetic fit to multiple concentrations of the fabs to estimate the kₐ and k_{d} of the interactions. Letters indicate the clone listed in Table 1, which also lists the resulting rate constants and calculated K_{D}

[0081] FIGS. 51A-51C SPR sensorgrams for clones CPA.7.009 (A), CPA.7.003 (B), and CPA.7.014 (C) binding to captured human PVRIG fusion protein. These are examples where the sensorgrams showed complex, multi-phasic kinetics and therefore the rate constants could not be reliably estimated.

[0082] FIGS. 52A and 52B shows the results of the blocking studies from “Additional Validation Study 4” in Example 5.

[0083] FIG. 53 shows that following allo-activation, the expression of PVRIG was upregulated on CD4+ T cells as well as on CD8+ T cells and double negative gamma delta T cells. This upregulation was observed in PBMCs of one out of two donors tested.

[0084] FIG. 54 shows the human cell lines tested in Example 1G.

[0085] FIG. 55 shows the mouse cell lines tested in Example 1G.

[0086] FIGS. 56A-56C. Transcript expression of human PVRIG in various Human cancer cell lines. Verification of the human transcript in several cell lines was performed by qRT-PCR using TaqMan probe. Column diagram represents data observed using TaqMan probe Hs04189293_g1. Ct values are detailed in the table. Analysis indicating high transcript in Jurkat, HUT78 and HL60, and lower levels in THP1 and RPMI8226 cell lines.

[0087] FIGS. 57A-57B Transcript expression of mouse PVRIG in various mouse cell lines. Verification of the mouse transcript in several cell lines was performed by qRT-PCR using TaqMan probe. Column diagram represents data observed using TaqMan probe CC70L8H. Ct values are detailed in the table. Analysis indicating high transcript in NIH/3T3, Renca, SaI/N and J774A.1, and lower levels in CT26 and B104-1-1 cell lines.

[0088] FIG. 58 Endogenous expression of PVRIG protein was analyzed by WB with the commercial anti-human PVRIG rabbit polyclonal antibody (Sigma, cat# HPA047497), using whole cell extracts of various cell lines. Extracts of HEK293 cells ectopically over-expressing human PVRIG (lane 2) or cells transfected with empty vector (lane 1), were used as positive and negative controls, respectively.

[0089] FIG. 59 qRT-PCR analysis of human PVRIG transcript in Jurkat cell line transfected with PVRIG siRNA. Jurkat human cancer cell line, transfected with human PVRIG siRNA or with scrambled siRNA were analyzed by qRT-PCR using human PVRIG TaqMan probe # Hs04189293_g1, and was normalized with geo-mean of two housekeeping genes indicated in table above. Ct values are detailed in the table. Standard deviation of technical triplicates of the PCR reaction are indicated.

[0090] FIG. 60 Membrane expression of human PVRIG protein in Jurkat human cell line transfected with human PVRIG siRNA. Jurkat cells transfected with Human PVRIG siRNA were stained with monoclonal anti-PVRIG Ab Inc, CPA.7.021 (left panel, green line) or with IgG2 isotype control antibody (left panel, blue line) and with Sigma Ab (right panel, red line) or with IgG (right panel, blue line). Cells transfected with Scrambled siRNA were stained with the same anti-PVRIG (orange) or isotype control (left panel red line for mAb staining; right panel green line for Sigma Ab). Following cell washing, PE-Goat anti-mouse secondary conjugated Ab was added to Sigma Ab only.

[0091] FIG. 61 indicates the summary of the findings described in this report, highlighting the cell lines showing correlation between qPCR and FACS, confirmed by knock down, HSKG-housekeeping gene, +—Positive, NT—Not Tested, X—negative, KD—knockdown.

[0092] FIG. 62 indicates the summary of the findings described in this report, highlighting the cell lines showing correlation between qPCR and FACS, confirmed by knock down. HSKG—housekeeping gene, +—Positive, NT—Not Tested, X—negative, KD—knockdown.

[0093] FIGS. 63A-63D depicts the vhCDR1, vhCDR2, vhCDR3, v1CDR1, v1CDR2 and v1CDR3 sequences of each of the enumerated CPA antibodies of the invention, CPA.7.001 to CPA.7.050 are human sequences (from Phage display).

[0094] FIGS. 64A and 64B shows the results of the screening in Example 1B.

[0095] FIG. 65 Antibodies specifics and staining concentration used in Example H.

[0096] FIGS. 66A-66C depicts the sequences of human IgG1, IgG2, IgG3 and IgG4.

[0097] FIG. 67 depicts a number of human PVRIG ECD fragments.

[0098] FIG. 68 depicts the binding curve for CPA.7.021 as shown in EXAMPLE 13.

[0099] FIGS. 69A-69C Detection of CD137 and PD-1 surface expression. CD8+ T cells, CD4+ T cells and TILs were activated and monitored over time at 4 time-points as described in M&M. Resting or activated cells were first gated for lymphocytes (FSC-A vs. SSC-A), followed by live cells gate, further gated for singlets (FSC-H vs. FSC-A), CD4/CD8 positive cells and further gated for CD137 and PD1. Surface expression of PD-1 (left) and CD137 (right) on (A) CD8+ T cells (B) CD4+ T cells and (C) TILs at different time-points normalized to isotype control over the time course of activation.

[0100] FIGS. 70A-70C PVRIG expression on resting and activated CD4+ T and CD8+ T cells. CD4+ and CD8+ T cells were activated and monitored over time at 4 time-points as described in M&M. Cells were stained with viability dye, then incubated with anti-PVRIG and isotype control (7.5 μg/ml), and evaluated by flow cytometry. (A) Expression on CD4+ T cells. Expression of PVRIG on live resting (time 0) and activated CD4+ cells following singlet gating for 24, 48, 72 h and 144 h compared to isotype control. (B) Expression on CD8+ T cells. Expression of PVRIG on live resting (time 0) and activated CD8+ cells following singlet gating for 24, 48, 72 h and 144 h compared to isotype control. Shown are the Geometric Mean of the fluorescent intensity values obtained. (C) Normalization of fold induction staining with anti-PVRIG-CPA.7.021 ab compared to human IgG2 isotype over the time course of activation.

[0101] FIGS. 71A-71C PVRIG expression on resting and activated TILs. TILs Mart1 and 209 were activated and monitored over time at 4 time-points as described in M&M. Cells were stained with viability dye, then incubated with anti-PVRIG and isotype control (7.5 μg/ml), and evaluated by flow cytometry. (A) Expression on TIL Mart1. Expression of PVRIG on live resting (time 0) and activated TIL following singlet gating for 24, 48, 72 h and 144 h compared to isotype control. (B) Expression on TIL 209. Expression of PVRIG on live resting (time 0) and activated TIL following singlet gating for 24, 48, 72 h and 144 h compared to isotype control. Shown are the Geometric Mean of the fluorescent intensity values obtained. (C) Normalization of fold induction staining with anti PVRIG-CPA.7.021 ab compared with human IgG2 isotype control over the time course of activation.

[0102] FIG. 72 Expression of PVRL2 on monocyte-derived DC. PVRL2 expression (triangles with broken line) as a function of time (days) relative to isotype control (circles with solid line) is shown. Day after differentiation indicates time after addition of GM-CSF and IL-4 to monocytes.

[0103] FIGS. 73A-73B Expression of PVRIG on CD4 and CD8 T cells in the MLR. The expression of PVRIG on proliferating (CFSE low) and non-proliferating T cells (CFSE high) is shown. Data is derived from three individual CD3 T cell donors and from a range of PVRIG antibodies. CFSE is measured on the X axis and PVRIG expression is measured on the Y axis. The top 3 series of scatter plots indicates PVRIG expression on CD4 T cells, and the bottom 3 series indicates expression on CD8 T cells.

[0104] FIGS. 74A and 74B Normalised expression of PVRIG on CD4 and CD8 T cells in the MLR. The expression of PVRIG relative to mIgG1 isotype control is shown from three individual CD3 T cell donors across all antibodies analysed.

[0105] FIGS. 75A and 75B PVRIG antibodies increase T cell proliferation in the MLR. The percentages of CFSE low cells are shown from MLR assays treated with the indicated PVRIG antibodies. Each graph represents one individual CD3 T cell donor.

[0106] FIG. 76 FACS-based epitope analysis of PVRIG antibodies on T cells. The level of binding of conjugated CPA.7.021 (derived from phage campaign) is indicated after pre-incubation of T cells with unconjugated PVRIG antibodies derived from our hybridoma campaign, as well as relevant controls. Analysis was performed on CFSE low T cells derived from the MLR.

[0107] FIG. 77 PVRIG antibody specificity towards HEK cells engineered to overexpress PVRIG. Data shows absolute geometric MFI (gMFI) measurements as a function of increasing antibody concentration. The broken black line with squares shows staining of HEK hPVRIG cells with a representative anti-human PVRIG antibody (CHA.7.518), and the solid black line with circles shows staining of HEK parental cells with the same antibody.

[0108] FIG. 78 PVRIG antibodies show specificity towards Jurkat cells. Data shows absolute geometric MFI (gMFI) measurements by FACS as a function of increasing antibody concentration. The broken black line with squares shows staining of Jurkat cells with anti-human PVRIG antibody (CHA.7.518) and the solid black line with circles shows staining with an mIgG1 control antibody.

[0109] FIGS. 79A and 79B PVRIG hybridoma antibody binding characteristics to HEK hPVRIG engineered cell lines, HEK parental cells, and Jurkat cells. HEK OE denotes HEK hPVRIG cells, HEK par denotes HEK parental cells. For Jurkat data, gMFIr indicates the fold difference in geometric MFI of PVRIG antibody staining relative to their controls. Concentration indicates that at which the gMFIr was calculated. No binding indicates antibody does not bind to the tested cell line. Highlighted antibodies are the ‘top four’ antibodies of interest.

[0110] FIGS. 80A and 80B PVRIG hybridoma antibody binding characteristics to primary human PBMC, cyno over-expressing cells, and cyno primary PBMC. Expi cyno OE denotes expi cells transiently transfected with cPVRIG, expi par denotes expi parental cells. gMFIr indicates the fold difference in geometric MFI of PVRIG antibody staining relative to their controls. Concentrations indicate that at which the gMFIr was calculated. Not tested indicates antibodies that were not tested due to an absence of binding to human HEK hPVRIG, expi cPVRIG cells, or not meeting binding requirements to PBMC subsets. Highlighted antibodies are the ‘top four’ antibodies of interest.

[0111] FIGS. 81A and 81B Summary of blocking capacity of PVRIG antibodies in the FACS-based competition assay. The IC₅₀ of inhibition is indicated. No IC₅₀ indicates that these antibodies are non-blockers. Highlighted antibodies are the ‘top four’ antibodies of interest.

[0112] FIG. 82 KD validation performed in TILs 24 hr post-electroporation with siRNA. TILs were stained with anti PVRIG or anti PD-1 analyzed by FACS. Percentage of the KD population is calculated relative to SCR stained with the relevant Ab.

[0113] FIGS. 83A-83C KD TILs (MART-1 specific) were co-cultured with melanoma cells 624 in 1:1 E:T for 18 hr and stained with anti CD8a antibody as well as anti CD137 antibody and analyzed by FACS. Geometric mean fluorescence intensity are plotted (A). Co-culture supernatant was collected as well and tested in Th1 Th2 Th17 cytometric bead array assay to detect secreted cytokines. IFNγ and TNF levels were detected (B,C). The percentage effect of a treatment is calculated by comparing each treatment to SCR control. The figure shows representative data of 2 independent experiments. Treatments were compared by Student's t-test (*P≦0.05, **P≦0.01) of triplicate samples.

[0114] FIGS. 84A-84B KD TILs (F4 gp100 specific) were co-cultured with melanoma cells 624 in 1:3 E:T for 18 hr and stained with anti CD8a antibody as well as anti CD137 antibody and analyzed by FACS. Geometric mean fluorescence intensity are plotted (A). Co-culture supernatant was collected as well and tested in Th1 Th2 Th17 cytometric bead array assay to detect secreted cytokines. IFNγ levels were detected (B). Percentage of the effect a treatment has is calculated by comparing each treatment to SCR control. Figure shows representative data of 2 independent experiments. Treatments were compared by Student's t-test (*P<0.05, **P<0.01) of triplicate samples.

[0115] FIGS. 85A-85B TILs from were co-cultured with melanoma cells 624 at 1:1 E:T for 18 hr in the presence of anti-PVRIG Ab (CPA.7.021; 10 μg/ml), anti-TIGIT (10A7 clone; 10 μg/ml) or in combination. Supernatant was collected and tested in Th1 Th2 Th17 cytometric bead array assay to detect secreted cytokines. IFNγ (A) and TNF (B) levels were detected. Treatments were compared by Student's t-test (*P≦0.05, **P≦0.01) of triplicate samples.

[0116] FIGS. 86A-86F MART-1 or 209 TILs were co-cultured with melanoma cells 624 at 1:1 E:T for 18 hr in the presence of anti-PVRIG Ab (CPA.7.021; 10 μg/ml), anti-DNAM1 (DX11 clone; 10 μg/ml) or in combination. Supernatant was collected and tested in Th1 Th2 Th17 cytometric bead array assay to detect secreted cytokines. IFNγ (A,D) and TNF (B,E) levels were detected. TILs were stained for surface expression of CD137 (C,F).

[0117] FIGS. 87A and 87B TILs (F4) were co-cultured with melanoma cells 624 at 1:3 E:T for 18 hr in the presence of anti-PVRIG Ab (CPA.7.021; 10 μg/ml), anti-TIGIT (10A7 clone; 10 μg/ml), anti-PD1 (mAb 1B8, Merck; 10 μg/ml) or in combination. Supernatant was collected and tested in Th1 Th2 Th17 cytometric bead array assay to detect secreted cytokines. IFNγ (A) and TNF (B) levels were detected.

[0118] FIGS. 88A-88I I depict four humanized sequences for each of CHA.7.518, CHA.7.524, CHA.7.530, CHA.7.538_1 and CHA.7.538_2. Note that the light chain for CHA.7.538_2 is the same as for CHA.7.538_1. The “H1” of each is a “CDR swap” with no changes to the human framework. Subsequent sequences alter framework changes shown in larger bold font. CDR sequences are noted in bold. CDR definitions are AbM from website www.bioinf.org.uk/abs/. Human germline and joining sequences from IMGT® the international ImMunoGeneTics® information system www.imgt.org (founder and director: Marie-Paule Lefranc, Montpellier, France). Residue numbering shown as sequential (seq) or according to Chothia from website www.bioinf.org.uk/abs/(AbM). “b” notes buried sidechain; “p” notes partially buried; “i” notes sidechain at interface between VH and VL domains. Sequence differences between human and murine germlines noted by asterisk (*). Potential additional mutations in frameworks are noted below sequence. Potential changes in CDR sequences noted below each CDR sequence as noted on the figure (# deamidation substitutions: Q/S/A; these may prevent asparagine (N) deamidation. @ tryptophan oxidation substitutions: Y/F/H; these may prevent tryptophan oxidation; @ methionine oxidation substitutions: L/F/A).

[0119] FIGS. 89A-89E depicts a collation of the humanized sequences of five CHA antibodies.

[0120] FIG. 90 depicts schemes for combining the humanized VH and VL CHA antibodies of FIGS. 88A-88I and FIGS. 89A-89E. The “chimVH” and “chimVL” are the mouse variable heavy and light sequences attached to a human IgG constant domain.

[0121] FIG. 91 PVRIG hybridoma antibody binding characteristics to primary human PBMC, cyno over-expressing cells, and cyno primary PBMC. Expi cyno OE denotes expi cells transiently transfected with cPVRIG, expi par denotes expi parental cells. gMFIr indicates the fold difference in geometric MFI of PVRIG antibody staining relative to their controls. Concentrations indicate that at which the gMFIr was calculated. Not tested indicates antibodies that were not tested due to an absence of binding to human HEK hPVRIG, expi cPVRIG cells, or not meeting binding requirements to PBMC subsets. Highlighted antibodies are four antibodies for which humanization was done (See FIG. 90).

[0122] FIG. 92 Summary of blocking capacity of PVRIG antibodies in the FACS-based competition assay. The IC50 of inhibition is indicated. No IC50 indicates that these antibodies are non-blockers. Highlighted antibodies are four antibodies for which humanization was done (See FIG. 90).

[0123] FIGS. 93A-93C Effect of PVRIG antibodies in blocking the interaction between PVRIG and PVRL2. (a-b) Data shows changes in absolute gMFI representing changes in binding of soluble PVRIG to HEK cells when four PVRIG antibodies are added to disrupt the interaction. Also indicated are the IC₅₀ values of each antibody in each assay. A) Data shows disruption of soluble PVRIG with HEK cells when the antibodies are pre-incubated with antigen. B) Data shows disruption of soluble PVRIG with HEK cells when the antibodies are added concomitantly with antigen. C) Data shows changes in absolute gMFI representing changes in binding of soluble PVRL2 Fc to HEK hPVRIG cells when four PVRIG antibodies are added to disrupt the interaction. IC₅₀ values of each antibody are indicated. ND denotes not determined.

[0124] FIGS. 94A-94H NK cell receptor and ligand expression on Reh cells. Expression of NK cell receptors such as a) PVRIG, b) DNAM-1, c) TIGIT are shown. Expression of NK receptor ligands such as d) PVR, e) PVRL2, f) ULBP2/5/6, g) ULBP3, and h) MICA/B are shown. Solid grey histograms represent isotype controls and open black histograms represent the antibody of interest.

[0125] FIGS. 95A-95F Effect of PVRIG antibodies on enhancing NK cell-mediated cytotoxicity against Reh cells. The effect of 5 μg/ml CPA.7.002 (a), CPA.7.005 (b), CPA.7.021 (a-c), and CPA.7.050 (c) was examined in NK cell cytotoxicity assays against Reh cells where the number of NK cells was titrated against a constant number of Reh cells. d) The effect of varying the concentration of CPA.7.002 and CPA.7.021 on NK cell-mediated cytotoxicity with a constant number of NK to Reh cells (5:1) was examined. DNAM-1 (e) and TIGIT (0 were examined in assays with conditions as outlined in panels a-c.

[0126] FIGS. 96A-96H NK cell receptor and ligand expression on MOLM-13 cells. Expression of NK cell receptors such as a) PVRIG, b) DNAM-1, c) TIGIT are shown. Expression of NK receptor ligands such as d) PVR, e) PVRL2, f) ULBP2/5/6, g) ULBP3, and h) MICA/B are shown. Solid grey histograms represent isotype controls and open black histograms represent the antibody of interest.

[0127] FIGS. 97A and 97B Effect of PVRIG antibodies on enhancing NK cell-mediated cytotoxicity against MOLM-13 cells. a) The effect of 5 μg/ml CPA.7.002, CPA.7.005, and CPA.7.021 was examined in NK cell cytotoxicity assays against MOLM-13 cells where the number of NK cells was titrated against a constant number of MOLM-13 cells. b) TIGIT was examined similar to panel a.

[0128] FIG. 98 Summary of blocking capacity of PVRIG antibodies in the cellular biochemical assay. Assay permutation and orientation, and the IC₅₀ of inhibition are indicated. (P) indicates the assay permutation where PVRIG antibodies are pre-incubated with PVRIG antigen prior to addition to HEK cells. (NP) indicates the concomitant addition of PVRIG antibodies and PVRIG antigen to HEK cells. Increased binding indicates that PVRL2 Fc binding to HEK hPVRIG cells was enhanced, rather than inhibited.

[0129] FIG. 99: Summary of the activity of select PVRIG antibodies in NK cell cytotoxicity assays against Reh and MOLM-13 cells. Fold change in cytotoxicity relative to control was calculated by dividing the absolute level of killing (%) in the condition with PVRIG antibody, by the absolute level of killing (%) with control antibody. Fold change is calculated from the 5:1 effector to target ratio.

[0130] FIG. 100 Sequence alignment of PVRIG orthologs. Aligned sequences of the human, cynomolgus, marmoset, and rhesus PVRIG extra-cellular domain. The differences between human and cynomolgus are highlighted in yellow.

[0131] FIG. 101 Binding of anti human PVRIG antibodies to cyno, human, cyno/human hybrid PVRIG variants. Binding of antibodies to wild type cyno PVRIG (), H61R cyno PVRIG (▪), P67S cyno PVRIG (▴), L95R/T97I cyno PVRIG (▾), and wild type human PVRIG (♦) are shown. The ELISA signals are plotted as a function of antibody concentration.

[0132] FIG. 102 Correlation of epitope group and cyno cross-reactivity of anti-human PVRIG antibodies.

[0133] FIGS. 103A-103BX shows a number of sequences of use in the invention.

[0134] FIGS. 104A and 104B shows the alignment of the PVRIG protein isoforms as splice variants. P0 is SEQ ID NO:1557, P1 is SEQ ID NO:1558, P6 is SEQ ID NO:1559, P8 is SEQ ID NO:1560, P4 is SEQ ID NO:1561, P7 is SEQ ID NO:1562, P14 is SEQ ID NO:1563, P3 is SEQ ID NO:1564, P10 is SEQ ID NO:1565 and P13 is SEQ ID NO:1566.

[0135] FIG. 105 depicts a number of linker sequences that can find use in the present invention.

### DETAILED DESCRIPTION OF THE INVENTION

### I. Introduction

[0136] Cancer can be considered as an inability of the patient to recognize and eliminate cancerous cells. In many instances, these transformed (e.g. cancerous) cells counteract immunosurveillance. There are natural control mechanisms that limit T-cell activation in the body to prevent unrestrained T-cell activity, which can be exploited by cancerous cells to evade or suppress the immune response. Restoring the capacity of immune effector cells—especially T cells—to recognize and eliminate cancer is the goal of immunotherapy. The field of immuno-oncology, sometimes referred to as “immunotherapy” is rapidly evolving, with several recent approvals of T cell checkpoint inhibitory antibodies such as Yervoy, Keytruda and Opdivo. These antibodies are generally referred to as “checkpoint inhibitors” because they block normally negative regulators of T cell immunity. It is generally understood that a variety of immunomodulatory signals, both costimulatory and coinhibitory, can be used to orchestrate an optimal antigen-specific immune response. Generally, these antibodies bind to checkpoint inhibitor proteins such as CTLA-4 and PD-1, which under normal circumstances prevent or suppress activation of cytotoxic T cells (CTLs). By inhibiting the checkpoint protein, for example through the use of antibodies that bind these proteins, an increased T cell response against tumors can be achieved. That is, these cancer checkpoint proteins suppress the immune response; when the proteins are blocked, for example using antibodies to the checkpoint protein, the immune system is activated, leading to immune stimulation, resulting in treatment of conditions such as cancer and infectious disease.

[0137] Thus, without wishing to be limited by a single hypothesis, PVRIG shows inhibitory effects on the following immune functions: T cell activation and proliferation, cytotoxic T lymphocyte (CTL) immunity and CTL-directed killing of target cells, e.g., cancer cells, CD4⁺ T cell immunity, antigen-specific CD4⁺ T cell immunity, natural killer (NK) cell mediated killing of target cells, and the secretion of certain cytokines such as IL-2, INFN-γ and TNF-α by T cells.

[0138] Again without wishing to be limited by a single hypothesis, PVRIG shows potentiating effects on the following immune functions: induction or differentiation and proliferation of inducible T regulatory or suppressor cells (iTregs). These cells are known to be involved in eliciting tolerance to self-antigens and to suppress anti-tumor immunity.

[0139] Again without wishing to be limited by a single hypothesis, PVRIG contributes to a non-functional phenotype of CD8 T cell from the tumor environment, also known as T cell exhaustion.

[0140] The flip side of immuno-oncology is the suppression of T cell activation in conditions where the immune system is too active, or is launching an immune response to an auto-antigen, etc. Thus, by providing PVRIG proteins (for example as fusion proteins, as discussed below), treatment of immune conditions such as auto-immune disease, inflammation and allergic diseases can be treated. That is, as PVRIG has an inhibitory effect on specific immune cells such as CD4⁺ T cells, CD8⁺ T cells or CTLs, and NK cells, which cells are known to be involved in the pathology of certain immune conditions such as autoimmune and inflammatory disorders, as well as eliciting a potentiating effect on Tregs or MDSCs, PVRIG polypeptides which potentiate or agonize the effects of PVRIG on immunity may optionally be used for treating conditions wherein the suppression of T cell or NK mediated immunity and/or the induction of immune tolerance or prolonged suppression of antigen-specific immunity is therapeutically desirable, e.g., the treatment of autoimmune, inflammatory or allergic conditions, and/or the suppression of undesired immune responses such as to cell or gene therapy, adverse immune responses during pregnancy, and adverse immune responses to transplanted heterologous, allogeneic or xenogeneic cells, organs and tissues and for inhibiting or preventing the onset of graft versus host disease (GVHD) after transplant.

[0141] Therefore, in one embodiment the present invention broadly relates to the development of novel “immunomodulatory proteins” wherein this includes PVRIG polypeptides that antagonize or block the effects of PVRIG on immunity and particularly the effects of PVRIG, on specific types of immune cells and cytokine production (i.e., “immunostimulatory PVRIG polypeptides or fusion proteins and/or immunostimulatory PVRIG antibodies”).

[0142] Additionally, the invention relates to PVRIG polypeptides that agonize or mimic the effects of PVRIG on immunity and particularly the effects of PVRIG on specific types of immune cells and cytokine production (i.e., “immunoinhibitory PVRIG polypeptides or fusion proteins”).

### II. PVRIG Mechanism of Action

[0143] Accordingly, as discussed herein, PVRIG is a immune checkpoint protein, sometimes referred to as “an immuno-oncology protein”. As has been shown for PD-1 and CTLA-4, among others, immune checkpoint proteins can be exploited in several ways, to either immunopotentiate the immune system to increase immune activity, such as through the activation of T cells for treatments of diseases such as cancer and infectious disease, or through immunoinhibition, where immunosuppression is desired, for example in allergic reactions, autoimmune diseases and inflammation. PVRIG as shown herein exhibits negative signaling on the immune system, by suppressing T cell activation and other pathways as outlined herein. Thus, by reducing the activity of PVRIG, for example by inhibiting its binding ability to its ligand such as PVLR2, the suppression is decreased and the immune system can be activated or stimulated to treat cancer, for example. Conversely, by increasing the activity of PVRIG (“stimulating” the activity with a “stimulator”), for example by adding additional PVRIG (a “stimulator of PVRIG”) to a host in the form of a soluble ECD (and optionally a fusion protein), the suppression is increased and the immune system is suppressed, allowing for treatment of diseases associated with increased immune function such as autoimmune diseases and others outlined herein.

[0144] As shown in the Example section, the expression of PVRIG has been positively correlated to expression of PD-1, a known immune checkpoint protein. Additionally, introduction of PVRIG (as over expressed on PBLs or as an Fc-fusion protein) was shown to inhibit the activation of T cells, as shown in the Examples, and KD of PVRIG in T cells was shown to increase the activation of T cells, and anti-PVRIG antibodies have been shown to activate T cells and NK cells.

[0145] Accordingly, the present invention is directed to compounds that either suppress the signaling pathway triggered by the binding interaction of PVRIG and PVLR2 (leading to increased T cell and NK cell activation, among other things, leading to treatment of diseases such as cancer and pathogen infection), or activate the signaling pathway triggered by the binding interaction of PVRIG and PVLR2 (leading to decreased T cell and NK cell activation, among other things), leading to treatment of diseases such as autoimmune diseases and inflammation.

[0146] Thus, specific mechanisms of action are provided for the immunostimulatory actions of, for example, anti-PVRIG antibodies, that are useful for increasing immune function, for example for the treatment of cancer. These include, but are not limited to, (i) increases in immune response, (ii) increases in activation of αβ and/or γδ T cells, (iii) increases in cytotoxic T cell activity, (iv) increases in NK and/or NKT cell activity, (v) alleviation of αβ and/or γδ T-cell suppression, (vi) increases in pro-inflammatory cytokine secretion, (vii) increases in IL-2 secretion; (viii) increases in interferon-γ production, (ix) increases in Th1 response, (x) decreases in Th2 response, and (xi) decreases or eliminates cell number and/or activity of at least one of regulatory T cells (Tregs).

[0147] Furthermore, in some embodiments a PVRIG ECD (for example, in the form of an Fc fusion, for example) binds PVRL2 and interrupts one or more inhibitory signals (via PVRIG) and thus acts in an immunoinhibitory manner. These include, but are not limited to, (i) increases in immune response, (ii) increases in activation of αβ and/or γδ T cells, (iii) increases in cytotoxic T cell activity, (iv) increases in NK and/or NKT cell activity, (v) alleviation of αβ and/or γδ T-cell suppression, (vi) increases in pro-inflammatory cytokine secretion, (vii) increases in IL-2 secretion; (viii) increases in interferon-γ production, (ix) increases in Th1 response, (x) decreases in Th2 response, (xi) decreases or eliminates cell number and/or activity of at least one of regulatory T cells (Tregs), (xii) reduces regulatory cell activity, and/or the activity of one or more of myeloid derived suppressor cells (MDSCs), iMCs, mesenchymal stromal cells, TIE2-expressing monocytes, (xiii) decreases or eliminates M2 macrophages, (xiv) reduces M2 macrophage pro-tumorigenic activity, (xv) decreases or eliminates N2 neutrophils, (xvi) reduces N2 neutrophils pro-tumorigenic activity, (xvii) reduces inhibition of T cell activation, (xviii) reduces inhibition of CTL activation, (xix) reduces inhibition of NK and/or NKT cell activation, (xx) reverses αβ and/or γδ T cell exhaustion, (xxi) increases αβ and/or γδ T cell response, (xxii) increases activity of cytotoxic cells, (xxiii) stimulates antigen-specific memory responses, (xxiv) elicits apoptosis or lysis of cancer cells, (xxv) stimulates cytotoxic or cytostatic effect on cancer cells, (xxvi) induces direct killing of cancer cells, (xxvii) increases Th17 activity and/or (xxviii) induces complement dependent cytotoxicity and/or antibody dependent cell-mediated cytotoxicity.

[0148] Additionally, specific mechanisms of action are provided for the immunoinhibitory actions of, for example, PVRIG ECD domains (including fusions, as are outlined herein), that are useful for decreasing immune function, for example for the treatment of autoimmune disease and inflammation. These include, but are not limited to, (i) decreases immune response, (ii) decreases αβ and/or γδ T cell activation, (iii) decreases cytotoxic T cell activity, (iv) decreases natural killer (NK) and/or NKT cell activity, (v) decreases αβ and/or γδ T-cell activity, (vi) decreases pro-inflammatory cytokine secretion, (vii) decreases IL-2 secretion; (viii) decreases interferon-γ production, (ix) decreases Th1 response, (x) decreases increases Th2 response, (xvii) increases inhibition of T cell activation, (xviii) increases inhibition of CTL activation, (xix) increases inhibition of NK cell activation, (xx) increases αβ and/or γδ T cell exhaustion, (xxi) decreases αβ and/or γδ T cell response, (xxii) decreases activity of cytotoxic cells, (xxiii) reduces antigen-specific memory responses, (xxiv) inhibits apoptosis or lysis of cells, (xxv) decreases cytotoxic or cytostatic effect on cells, (xxvi) reduces direct killing of cells, (xxvii) decreases Th17 activity, and/or (xxviii) reduces complement dependent cytotoxicity and/or antibody dependent cell-mediated cytotoxicity.

### III. Methods of Screening

[0149] Accordingly, the present invention provides methods of screening for modulators of the PVRIG-PVLR2 interaction, which either leads to immunostimulation or immunoinhibition, as outlined herein. For example, compounds that inhibit the interaction of PVRIG and PVLR2, which normally leads to the suppression of T cell and/or NK cell activation and thus increase the immune response to allow for the ultimate administration to patients for the treatment of cancer and pathogen infections, for example. Conversely, compounds that increase the signaling due to the interaction of PVRIG and PVLR2, lead to increased suppression of T cell and/or NK cell activation, thus resulting in decreased immune responses, to allow for the ultimate administration to patients for the treatment of diseases associated with increased immune function such as autoimmune diseases and inflammation. In this latter case, the increase of signaling is termed “stimulation of binding”, which can be effected, for example, by adding a compound (a “stimulator”) such as the ECD of PVRIG, resulting in stimulated binding of the ECD to endogenous PVLR2 and triggering the signaling pathway.

[0150] A. Cell Based Assays

[0151] Accordingly, in one embodiment, the invention provides assays to screen for inhibitors of the binding association of PVRIG and PVLR2.

[0152] In one embodiment, the methods of screening provide cells that comprise an exogeneous recombinant nucleic acid encoding a human PVRIG protein, generally the full length protein including the transmembrane domain, such that the PVRIG protein is expressed in the correct orientation, resulting in the extracellular domain (ECD) being on the surface of the cell. By “exogeneous” in this context herein is meant that the gene (and any required expression vector sequences) is not endogeneous (naturally occurring in the genome) to the cell. In the case of non-human cell lines to be used in the assays herein, this means that the non-human cell line has a human gene transfected into the cell. In the case where human cell lines are used (preferable in most instances), and thus contain an endogeneous PVRIG gene, the cells contain at least an additional, recombinant human gene, if not additional copies as well.

[0153] In this embodiment, cells expressing exogeneous PVRIG are contacted with candidate agent(s) as is more fully outlined below, and a labeled PVLR2 protein (generally the ECD domain). By comparing the results to a reference standard not including the candidate agent, where binding is known to occur, the lack of bound label means the candidate agent binds to the PVRIG in such a way as to prevent PVLR2 binding.

[0154] In one embodiment, the methods are reversed, and thus use cells that comprise an exogeneous recombinant nucleic acid encoding a human PVLR2 protein, generally the full length protein including the transmembrane domain, such that the PVLR2 protein is expressed in the correct orientation, resulting in the extracellular domain (ECD) being on the surface of the cell.

[0155] In this embodiment, cells expressing exogeneous PVLR2 are contacted with candidate agent(s) as is more fully outlined below, and a labeled PVRIG protein (generally the ECD domain). By comparing the results to a reference standard not including the candidate agent, where binding is known to occur, the lack of bound label means the candidate agent binds to the PVLR2 in such a way as to prevent PVRIG binding.

[0156] As will be appreciated by those in the art, these assays can be done on surfaces such as in microtiter plates.

[0157] B. Support Based Assays

[0158] In one embodiment, the screening assay is a solid support assay, where one or the other of PVRIG and PVLR2 is attached, for example to a microtiter plate. Candidate agents and labeled proteins, e.g. the “other” of the PVRIG and PVLR2 is added. If the candidate agent blocks binding, this can be determined using the read out. For example, in one embodiment, PVRIG is attached to the solid support, generally at discrete locations. A candidate agent and PVLR2 is added, for example that is either directly labeled (for example with a fluorophore as outlined below), or indirectly labeled (for example using a labeled anti-PVLR2 antibody). After allowing a sufficient period of time and after washing, if the candidate agent blocks the interaction of PVRIG and PVLR2, no signal will be seen. If the agent does not, the signal will be generated and bound to the support. Similarly, this can be done using attachment of the PVLR2 to the solid support and adding labeled PVRIG and candidate agents.

[0159] C. FRET Based Assays

[0160] In some embodiments, this binding assay can be done using fluorescent resonance energy transfer (FRET) assays, as is well known in the art, where one of the receptor-ligand pair of PVRIG and PVLR2 has a FRET donor and the other has a FRET acceptor. Upon binding of the two, FRET occurs. If the candidate agent prevents binding, the FRET signal will be lost. This is also useful in competition assays, to determine whether the binding of the agent to PVRIG is stronger than the binding of PVLR2.

[0161] D. Functional Assays

[0162] These identified candidate agents that bind and block the interaction of the PVRIG and PVLR2 can then be further tested to see their effect on the signaling pathway. That is, the binding/blocking agents can be run in assays that measure T cell or NK cell activation, for example, to determine whether the blocking agents are immunostimulatory (increasing immune function such that diseases such as cancer can be treated) or immunoinhibitory (decreasing immune function to treat autoimmune diseases and inflammation).

[0163] In addition, the assays below can also be used to assess treatment efficacy, as is more further outlined below.

[0164] In some embodiments, the functional assay uses CTLs. The CTLs express a T cell receptor (TCR) recognizing a specific antigen (Ag) presented on an MHC molecule. Upon TCR Ag engagement, CTLs undergo activation as manifested by cell proliferation, up-regulation of activation markers (e.g. CD25, CD137 etc.), and cytokine secretion (e.g. interferon gamma, IL2, TNFsα etc.) and cytotoxic activity. Upon contact with PVRL2 expressed on cancer cells or antigen presenting cells, PVRIG mediates a negative signal to CTLs thereby causing down-regulation of CTL activation as manifested by the above readouts. Thus, contacting candidate agents that have shown binding and/or inhibition of receptor-ligand binding with CTLs will to interrupt the PVRIG-PVRL2 interaction and thereby release the negative signal mediated by PVRIG and enhances antigen specific CTL activation as manifested by cell proliferation, up-regulation of activation markers (e.g. CD25, CD137 etc.), and cytokine secretion (e.g. interferon gamma, IL2, TNF alfa etc.).

[0165] Similarly, in some embodiments, the functional assay uses NK cells. The NK cells express various activating and inhibitory receptors. The execution of NK cytotoxic activity is determined by the balance between the activatory and inhibitory signals derived from these receptors. Upon engagement of NK cells with certain target cells, NK cells undergo activation as manifested by cell proliferation, cytokine secretion (e.g. interferon gamma, IL2, TNF alfa etc.) and cytotoxic activity. Upon contact with PVRL2 expressed on cancer target cells, PVRIG mediates a negative signal to NK cells thereby causing down-regulation of NK cell activation as manifested by the above readouts. Contacting of candidate agents with NK cells will interrupt the PVRIG-PVRL2 interaction and thereby release the negative signal mediated by PVRIG and enhances NK cell activation as manifested by cell proliferation, cytokine secretion (e.g. interferon gamma, IL2, TNF alfa etc.) and cytotoxic activity.

[0166] In one embodiment, the signaling pathway assay measures increases or decreases in immune response as measured for an example by phosphorylation or de-phosphorylation of different factors, or by measuring other post translational modifications. An increase in activity indicates immunostimulatory activity and a decrease indicates immunoinhibitory activity. Appropriate increases or decreases in activity are outlined below.

[0167] In one embodiment, the signaling pathway assay measures increases or decreases in activation of αβ and/or γδ T cells as measured for an example by cytokine secretion or by proliferation or by changes in expression of activation markers like for an example CD137, CD107a, PD1, etc. An increase in activity indicates immunostimulatory activity and a decrease indicates immunoinhibitory activity. Appropriate increases or decreases in activity are outlined below.

[0168] In one embodiment, the signaling pathway assay measures increases or decreases in cytotoxic T cell activity as measured for an example by direct killing of target cells like for an example cancer cells or by cytokine secretion or by proliferation or by changes in expression of activation markers like for an example CD137, CD107a, PD1, etc. An increase in activity indicates immunostimulatory activity and a decrease indicates immunoinhibitory activity. Appropriate increases or decreases in activity are outlined below.

[0169] In one embodiment, the signaling pathway assay measures increases or decreases in NK and/or NKT cell activity as measured for an example by direct killing of target cells like for an example cancer cells or by cytokine secretion or by changes in expression of activation markers like for an example CD107a, etc. An increase in activity indicates immunostimulatory activity and a decrease indicates immunoinhibitory activity. Appropriate increases or decreases in activity are outlined below.

[0170] In one embodiment, the signaling pathway assay measures increases or decreases in αβ and/or γδ T-cell suppression. as measured for an example by cytokine secretion or by proliferation or by changes in expression of activation markers like for an example CD137, CD107a, PD1, etc. An increase in activity indicates immunostimulatory activity and a decrease indicates immunoinhibitory activity. Appropriate increases or decreases in activity are outlined below.

[0171] In one embodiment, the signaling pathway assay measures increases or decreases in pro-inflammatory cytokine secretion as measured for example by ELISA or by Luminex or by Multiplex bead based methods or by intracellular staining and FACS analysis or by Alispot etc. An increase in activity indicates immunostimulatory activity and a decrease indicates immunoinhibitory activity. Appropriate increases or decreases in activity are outlined below.

[0172] In one embodiment, the signaling pathway assay measures increases or decreases in IL-2 secretion as measured for example by ELISA or by Luminex or by Multiplex bead based methods or by intracellular staining and FACS analysis or by Alispot etc. An increase in activity indicates immunostimulatory activity and a decrease indicates immunoinhibitory activity.

[0173] In one embodiment, the signaling pathway assay measures increases or decreases in interferon-γ production as measured for example by ELISA or by Luminex or by Multiplex bead based methods or by intracellular staining and FACS analysis or by Alispot etc. An increase in activity indicates immunostimulatory activity and a decrease indicates immunoinhibitory activity. Appropriate increases or decreases in activity are outlined below.

[0174] In one embodiment, the signaling pathway assay measures increases or decreases in Th1 response as measured for an example by cytokine secretion or by changes in expression of activation markers. An increase in response indicates immunostimulatory activity and a decrease indicates immunoinhibitory activity. Appropriate increases or decreases in activity are outlined below.

[0175] In one embodiment, the signaling pathway assay measures increases or decreases in Th2 response as measured for an example by cytokine secretion or by changes in expression of activation markers. An increase in response indicates immunostimulatory activity and a decrease indicates immunoinhibitory activity. Appropriate increases or decreases in activity are outlined below.

[0176] In one embodiment, the signaling pathway assay measures increases or decreases cell number and/or activity of at least one of regulatory T cells (Tregs), as measured for example by flow cytometry or by IHC. A decrease in response indicates immunostimulatory activity and an increase indicates immunoinhibitory activity. Appropriate increases or decreases in activity are outlined below.

[0177] In one embodiment, the signaling pathway assay measures increases or decreases in M2 macrophages cell numbers, as measured for example by flow cytometry or by IHC. A decrease in response indicates immunostimulatory activity and a increase indicates immunoinhibitory activity. Appropriate increases or decreases in activity are outlined below.

[0178] In one embodiment, the signaling pathway assay measures increases or decreases in M2 macrophage pro-tumorigenic activity, as measured for an example by cytokine secretion or by changes in expression of activation markers. A decrease in response indicates immunostimulatory activity and a increase indicates immunoinhibitory activity.

[0179] In one embodiment, the signaling pathway assay measures increases or decreases in N2 neutrophils increase, as measured for example by flow cytometry or by IHC. A decrease in response indicates immunostimulatory activity and a increase indicates immunoinhibitory activity. Appropriate increases or decreases in activity are outlined below.

[0180] In one embodiment, the signaling pathway assay measures increases or decreases in N2 neutrophils pro-tumorigenic activity, as measured for an example by cytokine secretion or by changes in expression of activation markers. A decrease in response indicates immunostimulatory activity and a increase indicates immunoinhibitory activity. Appropriate increases or decreases in activity are outlined below.

[0181] In one embodiment, the signaling pathway assay measures increases or decreases in inhibition of T cell activation, as measured for an example by cytokine secretion or by proliferation or by changes in expression of activation markers like for an example CD137, CD107a, PD1, etc. An increase in response indicates immunostimulatory activity and a decrease indicates immunoinhibitory activity. Appropriate increases or decreases in activity are outlined below.

[0182] In one embodiment, the signaling pathway assay measures increases or decreases in inhibition of CTL activation as measured for an example by direct killing of target cells like for an example cancer cells or by cytokine secretion or by proliferation or by changes in expression of activation markers like for an example CD137, CD107a, PD1, etc. An increase in response indicates immunostimulatory activity and a decrease indicates immunoinhibitory activity. Appropriate increases or decreases in activity are outlined below.

[0183] In one embodiment, the signaling pathway assay measures increases or decreases in αβ and/or γδ T cell exhaustion as measured for an example by changes in expression of activation markers. A decrease in response indicates immunostimulatory activity and a increase indicates immunoinhibitory activity. Appropriate increases or decreases in activity are outlined below.

[0184] In one embodiment, the signaling pathway assay measures increases or decreases αβ and/or γδ T cell response as measured for an example by cytokine secretion or by proliferation or by changes in expression of activation markers like for an example CD137, CD107a, PD1, etc. An increase in activity indicates immunostimulatory activity and a decrease indicates immunoinhibitory activity. Appropriate increases or decreases in activity are outlined below.

[0185] In one embodiment, the signaling pathway assay measures increases or decreases in stimulation of antigen-specific memory responses as measured for an example by cytokine secretion or by proliferation or by changes in expression of activation markers like for an example CD45RA, CCR7 etc. An increase in activity indicates immunostimulatory activity and a decrease indicates immunoinhibitory activity. Appropriate increases or decreases in activity are outlined below.

[0186] In one embodiment, the signaling pathway assay measures increases or decreases in apoptosis or lysis of cancer cells as measured for an example by cytotoxicity assays such as for an example MTT, Cr release, Calcine AM, or by flow cytometry based assays like for an example CFSE dilution or propidium iodide staining etc. An increase in activity indicates immunostimulatory activity and a decrease indicates immunoinhibitory activity. Appropriate increases or decreases in activity are outlined below.

[0187] In one embodiment, the signaling pathway assay measures increases or decreases in stimulation of cytotoxic or cytostatic effect on cancer cells. as measured for an example by cytotoxicity assays such as for an example MTT, Cr release, Calcine AM, or by flow cytometry based assays like for an example CFSE dilution or propidium iodide staining etc. An increase in activity indicates immunostimulatory activity and a decrease indicates immunoinhibitory activity. Appropriate increases or decreases in activity are outlined below.

[0188] In one embodiment, the signaling pathway assay measures increases or decreases direct killing of cancer cells as measured for an example by cytotoxicity assays such as for an example MTT, Cr release, Calcine AM, or by flow cytometry based assays like for an example CFSE dilution or propidium iodide staining etc. An increase in activity indicates immunostimulatory activity and a decrease indicates immunoinhibitory activity. Appropriate increases or decreases in activity are outlined below.

[0189] In one embodiment, the signaling pathway assay measures increases or decreases Th17 activity as measured for an example by cytokine secretion or by proliferation or by changes in expression of activation markers. An increase in activity indicates immunoinhibitory activity and a decrease indicates immunostimulatory activity. Appropriate increases or decreases in activity are outlined below.

[0190] In one embodiment, the signaling pathway assay measures increases or decreases in induction of complement dependent cytotoxicity and/or antibody dependent cell-mediated cytotoxicity, as measured for an example by cytotoxicity assays such as for an example MTT, Cr release, Calcine AM, or by flow cytometry based assays like for an example CFSE dilution or propidium iodide staining etc. An increase in activity indicates immunostimulatory activity and a decrease indicates immunoinhibitory activity. Appropriate increases or decreases in activity are outlined below.

[0191] In one embodiment, the assay measures increases or decreases in cell proliferation as a function of activation or inhibition, using well known methodologies such as thymidine incorporation and CFSE dilution.

[0192] Appropriate increases in activity or response (or decreases, as appropriate as outlined above), are increases of 10%, 20%, 30%, 40%, 50%, 60%, 70%, 80%, 90%, 95% or 98 to 99% percent over the signal in either a reference sample or in control samples, for example test samples that do not contain an anti-PVRIG antibody of the invention. Similarly, increases of at least one-, two-, three-, four- or five-fold as compared to reference or control samples show efficacy.

[0193] E. Candidate Agents

[0194] The assays are run by contacting candidate agents with the PVRIG and PVLR2 proteins. By “candidate agent”, “candidate bioactive agent” or “candidate drugs” or grammatical equivalents herein is meant any molecule, e.g. proteins (which herein includes proteins, polypeptides, and peptides), small organic or inorganic molecules, polysaccharides, polynucleotides, etc. which are to be tested for binding to PVRIG, inhibition of the PVRIG-PVLR2 interaction, or activation of PVRIG. Candidate agents encompass numerous chemical classes. In a preferred embodiment, the candidate agents are organic molecules, particularly small organic molecules, comprising functional groups necessary for structural interaction with proteins, particularly hydrogen bonding, and typically include at least an amine, carbonyl, hydroxyl or carboxyl group, preferably at least two of the functional chemical groups. The candidate agents often comprise cyclical carbon or heterocyclic structures and/or aromatic or polyaromatic structures substituted with one or more chemical functional groups.

[0195] Candidate agents are obtained from a wide variety of sources, as will be appreciated by those in the art, including libraries of synthetic or natural compounds. As will be appreciated by those in the art, the present invention provides a rapid and easy method for screening any library of candidate agents, including the wide variety of known combinatorial chemistry-type libraries.

[0196] In a preferred embodiment, candidate agents are synthetic compounds. Any number of techniques are available for the random and directed synthesis of a wide variety of organic compounds and biomolecules, including expression of randomized oligonucleotides.

[0197] Alternatively, a preferred embodiment utilizes libraries of natural compounds in the form of bacterial, fungal, plant and animal extracts that are available or readily produced.

[0198] Additionally, natural or synthetically produced libraries and compounds are readily modified through conventional chemical, physical and biochemical means. Known pharmacological agents may be subjected to directed or random chemical modifications, including enzymatic modifications, to produce structural analogs.

[0199] In a preferred embodiment, candidate bioactive agents include proteins, nucleic acids, and chemical moieties.

[0200] In a preferred embodiment, the candidate bioactive agents are proteins. By “protein” herein is meant at least two covalently attached amino acids, which includes proteins, polypeptides, oligopeptides and peptides. The protein may be made up of naturally occurring amino acids and peptide bonds, or synthetic peptidomimetic structures. Thus “amino acid”, or “peptide residue”, as used herein means both naturally occurring and synthetic amino acids. For example, homo-phenylalanine, citrulline and noreleucine are considered amino acids for the purposes of the invention. “Amino acid” also includes imino acid residues such as proline and hydroxyproline. The side chains may be in either the (R) or the (S) configuration. In the preferred embodiment, the amino acids are in the (S) or L-configuration. If non-naturally occurring side chains are used, non-amino acid substituents may be used, for example to prevent or retard in vivo degradations.

[0201] In a preferred embodiment, the candidate bioactive agents are naturally occurring proteins or fragments of naturally occurring proteins. Thus, for example, cellular extracts containing proteins, or random or directed digests of proteinaceous cellular extracts, may be attached to beads as is more fully described below. In this way libraries of procaryotic and eucaryotic proteins may be made for screening against any number of targets. Particularly preferred in this embodiment are libraries of bacterial, fungal, viral, and mammalian proteins, with the latter being preferred, and human proteins being especially preferred.

[0202] In many embodiments, the candidate agents are antibodies to PVRIG, generated as is known in the art and outlined herein.

[0203] In many embodiments, the candidate agents are ECDs of PVRIG, including fusion proteins and variants, as is known in the art and more fully outlined herein.

[0204] In a preferred embodiment, the candidate bioactive agents are peptides of from about 2 to about 50 amino acids, with from about 5 to about 30 amino acids being preferred, and from about 8 to about 20 being particularly preferred. The peptides may be digests of naturally occurring proteins as is outlined above, random peptides, or “biased” random peptides. By “randomized” or grammatical equivalents herein is meant that each nucleic acid and peptide consists of essentially random nucleotides and amino acids, respectively. Since generally these random peptides (or nucleic acids, discussed below) are chemically synthesized, they may incorporate any nucleotide or amino acid at any position. The synthetic process can be designed to generate randomized proteins or nucleic acids, to allow the formation of all or most of the possible combinations over the length of the sequence, thus forming a library of randomized candidate bioactive proteinaceous agents.

[0205] The library should provide a sufficiently structurally diverse population of randomized agents to effect a probabilistically sufficient range of diversity to allow binding to a particular target. Accordingly, an interaction library must be large enough so that at least one of its members will have a structure that gives it affinity for the target. Although it is difficult to gauge the required absolute size of an interaction library, nature provides a hint with the immune response: a diversity of 10⁷-10⁸ different antibodies provides at least one combination with sufficient affinity to interact with most potential antigens faced by an organism. Published in vitro selection techniques have also shown that a library size of 10⁷ to 10⁸ is sufficient to find structures with affinity for the target. A library of all combinations of a peptide 7 to 20 amino acids in length, such as generally proposed herein, has the potential to code for 20⁷ (10⁹) to 20²⁰. Thus, with libraries of 10⁷ to 10⁸ different molecules the present methods allow a “working” subset of a theoretically complete interaction library for 7 amino acids, and a subset of shapes for the 20²⁰ library. Thus, in a preferred embodiment, at least 10⁶, preferably at least 10⁷, more preferably at least 10⁸ and most preferably at least 10⁹ different sequences are simultaneously analyzed in the subject methods. Preferred methods maximize library size and diversity.

[0206] In one embodiment, the library is fully randomized, with no sequence preferences or constants at any position. In a preferred embodiment, the library is biased. That is, some positions within the sequence are either held constant, or are selected from a limited number of possibilities. For example, in a preferred embodiment, the nucleotides or amino acid residues are randomized within a defined class, for example, of hydrophobic amino acids, hydrophilic residues, sterically biased (either small or large) residues, towards the creation of cysteines, for cross-linking, prolines for SH-3 domains, serines, threonines, tyrosines or histidines for phosphorylation sites, etc., or to purines, etc.

### IV. PVRIG Proteins

[0207] The present invention is directed to the use of human Poliovirus Receptor Related Immunoglobulin Domain Containing Protein, or “PVRIG”, sometimes also referred to herein as “PV protein”, including fragments (including ECDs) as outlined below. The present invention provides PVRIG proteins. “Protein” in this context is used interchangeably with “polypeptide”, and includes peptides as well. PVRIG is a transmembrane domain protein of 326 amino acids in length, with a signal peptide (spanning from amino acid 1 to 40), an extracellular domain (spanning from amino acid 41 to 171), a transmembrane domain (spanning from amino acid 172 to 190) and a cytoplasmic domain (spanning from amino acid 191 to 326). The full length human PVRIG protein is shown in FIG. 25. There are two methionines that can be start codons, but the mature proteins are identical.

[0208] The full length PVRIG protein is shown in FIG. 25, and the wild type has a variety of putative splice variants, some of which are shown in FIGS. 104A and 104B.

[0209] Accordingly, as used herein, the term “PVRIG” or “PVRIG protein” or “PVRIG polypeptide” may optionally include any such protein, or variants, conjugates, or fragments thereof, including but not limited to known or wild type PVRIG, as described herein, including but not limited to those depicted in FIGS. 104A and 104B. In addition, there are some PVRIG ECD amino acid variants shown in FIGS. 103A-103BX, that also find use in the present invention.

[0210] Included in the invention are the sequences shown in FIG. 67, FIG. 91 and FIG. 92, as well as variants thereof possessing at least 80% sequence identity, more preferably at least 90% sequence identity therewith and even more preferably at least 95, 96, 97, 98 or 99% sequence identity therewith, and/or fusions and or conjugates thereof, and/or polynucleotides encoding same.

[0211] The term “soluble” form of PVRIG is also used interchangeably with the terms “soluble ectodomain (ECD)” or “ectodomain” or “extracellular domain (ECD)” as well as “fragments of PVRIG polypeptides”, which may refer broadly to one or more of the sequences shown in FIG. 67, FIG. 91 and FIG. 92.

[0212] In particular, the fragments of the extracellular domain of PVRIG can include any sequence corresponding to any portion of or comprising the Ig domain of the extracellular domain of PVRIG, having any sequence corresponding to residues of PVRIG (shown in FIG. 26) starting from any position between 21 and 25 and ending at any position between 124 and 128.

[0213] The PVRIG proteins contain an immunoglobulin (Ig) domain within the extracellular domain, which is a PVR-like Ig fold domain. The PVR-like Ig fold domain may be responsible for functional counterpart binding, by analogy to the other B7 family members. The PVR-like Ig fold domain of the extracellular domain includes one disulfide bond formed between intra domain cysteine residues, as is typical for this fold and may be important for structure-function. In SEQ ID NO: 3 these cysteines are located at residues 22 and 93 (or 94). In one embodiment, there is provided a soluble fragment of PVRIG; as described in greater detail below with regard to the section on fusion proteins, such a soluble fragment may optionally be described as a first fusion partner. Useful fragments are those that alone or when comprised in fusion proteins or multimerized retain the ability to bind to their natural molecular partner or partners, e.g., expressed on antigen presenting, T and NK cells, and/or which modulate (inhibit or promote) T cell and/or NK cell activation. A PVRIG polypeptide that is a fragment of full-length PVRIG typically has at least 20 percent, 30 percent, 40 percent, 50 percent, 60 percent, 70 percent, 80 percent, 90 percent, 95 percent, 98 percent, 99 percent, 100 percent, or even more than 100 percent of the ability to bind its natural molecular partner(s) and/or the modulation (agonism or antagonism) of one or more of the functional effects of PVRIG on immunity and on specific immune cells as compared to full-length PVRIG. Soluble PVRIG polypeptide fragments are fragments of PVRIG polypeptides that may be shed, secreted or otherwise extracted from the producing cells. In other embodiments, the soluble fragments of PVRIG polypeptides include fragments of the PVRIG extracellular domain that retain PVRIG biological activity, such as fragments that retain the ability to bind to their natural functional counterpart(s) and/or which modulate (inhibit or promote) T or NK cell activation. The extracellular domain can include 1, 2, 3, 4, or 5 contiguous amino acids from the transmembrane domain, and/or 1, 2, 3, 4, or 5 contiguous amino acids from the signal sequence. Alternatively, the extracellular domain can have 1, 2, 3, 4, 5 or more amino acids removed from the C-terminus, N-terminus, or both.

[0214] In some embodiments the PVRIG extracellular domain polypeptide comprises the amino acid sequence of the PVR-like Ig fold domain as set forth in FIGS. 104A-104B, or fragments or variants thereof. In other embodiments the PVRIG extracellular domain polypeptide consists essentially of the amino acid sequence of the PVR-like Ig fold domain as set forth in FIGS. 104A-104B.

[0215] Optionally, the PVRIG fragments refer also to any one of the polypeptide sequences listed in FIG. 67 and FIG. 92, which are reasonably expected to comprise functional regions of the PVRIG protein. This expectation is based on a systematic analysis of a set of protein complexes with solved 3 d structures, which contained complexes of Ig proteins (for example PDB id 1i85 which describe the complex of CTLA4 and CD86). The intermolecular contact residues from each “co-structure” from each PDB were collected and projected on the sequence of PVRIG. Several regions with clusters of interacting residues supported by several contact maps were identified and synthesized as a series of peptides and are reasonably expected to mimic the structure of the intact full length protein and thereby modulate one or more of the effects of PVRIG on immunity and on specific immune cell types. According to at least some embodiments of the invention, the PVRIG ECD fragments represented by polypeptide sequences listed in FIG. 67, are located as follows (as compared to human PVRIG ECD of FIG. 25, counting from the first amino acid of the ECD): PVRIG Fragment A is located at positions 46 to 66; PVRIG Fragment B is located at positions 46 to 79; PVRIG Fragment C is located at positions 63 to 79; PVRIG Fragment D is located at positions 91 to 106; PVRIG Fragment E is located at positions 91 to 114; PVRIG Fragment F is located at positions 11 to 25; PVRIG Fragment G is located at positions 3 to 24; PVRIG Fragment H is located at positions 18 to 36; PVRIG Fragment I is located at positions 29 to 52; PVRIG Fragment J is located at positions 73-98.

[0216] Generally, the PVRIG polypeptide fragments are expressed from nucleic acids that include sequences that encode a signal sequence. The signal sequence is generally cleaved from the immature polypeptide to produce the mature polypeptide lacking the signal sequence. The signal sequence of PVRIG can be replaced by the signal sequence of another polypeptide using standard molecule biology techniques to affect the expression levels, secretion, solubility, or other property of the polypeptide. The signal peptide sequence that is used to replace the PVRIG signal peptide sequence can be any known in the art.

### V. PVRIG Fusion Proteins

[0217] In some embodiments, the invention uses PVRIG polypeptides in the form of fusion proteins, wherein the PVRIG polypeptide (generally an ECD) is fused, recombinatly in frame to a fusion partner.

[0218] A. Fusion Partners

[0219] In many embodiments, the PVRIG polypeptide is fused to a “fusion partner” (also referred to herein as a “fusion partner moiety”), either directly or indirectly through the use of a linker as is more fully described below. As will be appreciated by those in the art, the fusion partner can be any moiety that is fused to the PVRIG polypeptide for any number of biochemical and/or biological reasons. In some embodiments, the fusion partner moiety increases the half life of the PVRIG fusion protein as is described below. In some embodiments, the fusion partner moiety adds an additional biologic or biochemical function to the PVRIG polypeptide.

[0220] In some embodiments, the fusion partner is generally linked at either the N-terminus or the C-terminus of the PVRIG polypeptide, optionally using a linker as described herein, such that the fusion protein has a formula selected from the group consisting of NH2-PVRIG polypeptide-fusion partner-COOH, PVRIG polypeptide, NH2-fusion partner-L-PVRIG polypeptide-COOH, and NH2-fusion partner-PVRIG polypeptide-COOH.

[0221] 1. HSA

[0222] In some embodiments, the PVRIG fusion partner is a human serum albumin (HSA), as is known in the art. In particular, fusions to HSA are known to increase serum half life of the fusion protein, as compared to the protein itself. These can include standard flexible linkers such as described herein and shown in FIG. 107.

[0223] 2. Fc Domains

[0224] In some embodiments, the PVRIG polypeptide is fused to a fusion partner that is an Fc domain. By “Fc domain” herein is meant the CH2-CH3 domains of an antibody, as is known in the art, optionally including some or all of the hinge region residues. The Fc domain is generally derived from a human IgG protein, generally IgG1, IgG2, IgG3 or IgG4, the sequences of which are shown in FIGS. 66A-66C. The choice of Fc domain may depend on whether effector function is desired (e.g. such that IgG1 is chosen), or not (IgG2 and IgG4, for example).

[0225] In addition, there are a number of Fc domain variants that can be optionally and independently included as amino acid substitutions. By “amino acid substitution” or “substitution” herein is meant the replacement of an amino acid at a particular position in a parent polypeptide sequence with a different amino acid. In particular, in some embodiments, the substitution is to an amino acid that is not naturally occurring at the particular position, either not naturally occurring within the organism or in any organism. For example, the substitution E272Y refers to a variant polypeptide, in this case an Fc variant, in which the glutamic acid at position 272 is replaced with tyrosine. For clarity, a protein which has been engineered to change the nucleic acid coding sequence but not change the starting amino acid (for example exchanging CGG (encoding arginine) to CGA (still encoding arginine) to increase host organism expression levels) is not an “amino acid substitution”; that is, despite the creation of a new gene encoding the same protein, if the protein has the same amino acid at the particular position that it started with, it is not an amino acid substitution.

[0226] In some embodiments, amino acid substitutions can be made in the Fc region, in general for altering binding to FcγR receptors. By “Fc gamma receptor”, “FcγR” or “FcgammaR” as used herein is meant any member of the family of proteins that bind the IgG antibody Fc region and is encoded by an FcγR gene. In humans this family includes but is not limited to FcγRI (CD64), including isoforms FcγRIa, FcγRIb, and FcγRIc; FcγRII (CD32), including isoforms FcγRIIa (including allotypes H131 and R131), FcγRIIb (including FcγRIIb-1 and FcγRIIb-2), and FcγRIIc; and FcγRIII (CD16), including isoforms FcγRIIIa (including allotypes V158 and F158) and FcγRIIIb (including allotypes FcγRIIIb-NA1 and FcγRIIIb-NA2) (Jefferis et al., 2002, Immunol Lett 82:57-65, entirely incorporated by reference), as well as any undiscovered human FcγRs or FcγR isoforms or allotypes. An FcγR may be from any organism, including but not limited to humans, mice, rats, rabbits, and monkeys. Mouse FcγRs include but are not limited to FcγRI (CD64), FcγRII (CD32), FcγRIII-1 (CD16), and FcγRIII-2 (CD16-2), as well as any undiscovered mouse FcγRs or FcγR isoforms or allotypes.

[0227] There are a number of useful Fc substitutions that can be made to alter binding to one or more of the FcγR receptors. Substitutions that result in increased binding as well as decreased binding can be useful. For example, it is known that increased binding to FcγRIIIa generally results in increased ADCC (antibody dependent cell-mediated cytotoxicity; the cell-mediated reaction wherein nonspecific cytotoxic cells that express FcγRs recognize bound antibody on a target cell and subsequently cause lysis of the target cell. Similarly, decreased binding to FcγRIIb (an inhibitory receptor) can be beneficial as well in some circumstances. Amino acid substitutions that find use in the present invention include those listed in U.S. Ser. No. 11/124,620 (particularly FIG. 41) and U.S. Pat. No. 6,737,056, both of which are expressly incorporated herein by reference in their entirety and specifically for the variants disclosed therein. Particular variants that find use include, but are not limited to, 236A, 239D, 239E, 332E, 332D, 239D/332E, 267D, 267E, 328F, 267E/328F, 236A/332E, 239D/332E/330Y, 239D, 332E/330L, 299T and 297N.

[0228] In addition, the antibodies of the invention are modified to increase its biological half-life. Various approaches are possible. For example, one or more of the following mutations can be introduced: T252L, T254S, T256F, as described in U.S. Pat. No. 6,277,375 to Ward. Alternatively, to increase the biological half-life, the antibody can be altered within the C_{H1} or C_{L} region to contain a salvage receptor binding epitope taken from two loops of a CH2 domain of an Fc region of an IgG, as described in U.S. Pat. Nos. 5,869,046 and 6,121,022 by Presta et al. Additional mutations to increase serum half life are disclosed in U.S. Pat. Nos. 8,883,973, 6,737,056 and 7,371,826, and include 428L, 434A, 434S, and 428L/434S.

[0229] In yet other embodiments, the Fc region is altered by replacing at least one amino acid residue with a different amino acid residue to alter the effector functions of the antibody. For example, one or more amino acids selected from amino acid residues 234, 235, 236, 237, 297, 318, 320 and 322 can be replaced with a different amino acid residue such that the antibody has an altered affinity for an effector ligand but retains the antigen-binding ability of the parent antibody. The effector ligand to which affinity is altered can be, for example, an Fc receptor or the C1 component of complement. This approach is described in further detail in U.S. Pat. Nos. 5,624,821 and 5,648,260, both by Winter et al.

[0230] In another example, one or more amino acids selected from amino acid residues 329, 331 and 322 can be replaced with a different amino acid residue such that the antibody has altered C1q binding and/or reduced or abolished complement dependent cytotoxicity (CDC). This approach is described in further detail in U.S. Pat. No. 6,194,551 by Idusogie et al.

[0231] In another example, one or more amino acid residues within amino acid positions 231 and 239 are altered to thereby alter the ability of the antibody to fix complement. This approach is described further in PCT Publication WO 94/29351 by Bodmer et al.

[0232] In yet another example, the Fc region is modified to increase the ability of the antibody to mediate antibody dependent cellular cytotoxicity (ADCC) and/or to increase the affinity of the antibody for an Fcγ receptor by modifying one or more amino acids at the following positions: 238, 239, 248, 249, 252, 254, 255, 256, 258, 265, 267, 268, 269, 270, 272, 276, 278, 280, 283, 285, 286, 289, 290, 292, 293, 294, 295, 296, 298, 301, 303, 305, 307, 309, 312, 315, 320, 322, 324, 326, 327, 329, 330, 331, 333, 334, 335, 337, 338, 340, 360, 373, 376, 378, 382, 388, 389, 398, 414, 416, 419, 430, 434, 435, 437, 438 or 439. This approach is described further in PCT Publication WO 00/42072 by Presta. Moreover, the binding sites on human IgG1 for FcγRI, FcγRII, FcγRIII and FcRn have been mapped and variants with improved binding have been described (see Shields, R. L. et al. (2001) J. Biol. Chem. 276:6591-6604). Specific mutations at positions 256, 290, 298, 333, 334 and 339 are shown to improve binding to FcγRIII. Additionally, the following combination mutants are shown to improve FcγRIII binding: T256A/S298A, S298A/E333A, S298A/K224A and S298A/E333A/K334A. Furthermore, mutations such as M252Y/S254T/T256E or M428L/N434S improve binding to FcRn and increase antibody circulation half-life (see Chan C A and Carter P J (2010) Nature Rev Immunol 10:301-316).

[0233] In still another embodiment, the glycosylation of an Fc domain is modified. For example, an aglycosylated Fc domain can be made (i.e., the antibody lacks glycosylation). Glycosylation can be altered to, for example, increase the affinity of the antibody for antigen or reduce effector function such as ADCC. Such carbohydrate modifications can be accomplished by, for example, altering one or more sites of glycosylation within the antibody sequence, for example N297. For example, one or more amino acid substitutions can be made that result in elimination of one or more variable region framework glycosylation sites to thereby eliminate glycosylation at that site.

[0234] Additionally or alternatively, an Fc domain can be made that has an altered type of glycosylation, such as a hypofucosylated antibody having reduced amounts of fucosyl residues or an Fc domain having increased bisecting GlcNac structures. Such altered glycosylation patterns have been demonstrated to increase the ADCC ability of antibodies. Such carbohydrate modifications can be accomplished by, for example, expressing the antibody in a host cell with altered glycosylation machinery. Cells with altered glycosylation machinery have been described in the art and can be used as host cells in which to express recombinant antibodies according to at least some embodiments of the invention to thereby produce an antibody with altered glycosylation. For example, the cell lines Ms704, Ms705, and Ms709 lack the fucosyltransferase gene, FUT8 (α(1,6) fucosyltransferase), such that antibodies expressed in the Ms704, Ms705, and Ms709 cell lines lack fucose on their carbohydrates. The Ms704, Ms705, and Ms709 FUT8 cell lines are created by the targeted disruption of the FUT8 gene in CHO/DG44 cells using two replacement vectors (see U.S. Patent Publication No. 20040110704 by Yamane et al. and Yamane-Ohnuki et al. (2004) Biotechnol Bioeng 87:614-22). As another example, EP 1,176,195 by Hanai et al. describes a cell line with a functionally disrupted FUT8 gene, which encodes a fucosyl transferase, such that antibodies expressed in such a cell line exhibit hypofucosylation by reducing or eliminating the α 1,6 bond-related enzyme. Hanai et al. also describe cell lines which have a low enzyme activity for adding fucose to the N-acetylglucosamine that binds to the Fc region of the antibody or does not have the enzyme activity, for example the rat myeloma cell line YB2/0 (ATCC CRL 1662). PCT Publication WO 03/035835 by Presta describes a variant CHO cell line, Lec13 cells, with reduced ability to attach fucose to Asn(297)-linked carbohydrates, also resulting in hypofucosylation of antibodies expressed in that host cell (see also Shields, R. L. et al. (2002) J. Biol. Chem. 277:26733-26740). PCT Publication WO 99/54342 by Umana et al. describes cell lines engineered to express glycoprotein-modifying glycosyl transferases (e.g., β(1,4)-N-acetylglucosaminyltransferase III (GnTIII)) such that antibodies expressed in the engineered cell lines exhibit increased bisecting GlcNac structures which results in increased ADCC activity of the antibodies (see also Umana et al. (1999) Nat. Biotech. 17:176-180). Alternatively, the fucose residues of the antibody may be cleaved off using a fucosidase enzyme. For example, the fucosidase α-L-fucosidase removes fucosyl residues from antibodies (Tarentino, A. L. et al. (1975) Biochem. 14:5516-23).

[0235] 3. Polyethylene Glycol Fusion Partners

[0236] In some embodiments, the fusion partner moiety is one or more polyethylene glycol (PEG) moieties. As is well known in the art, the modification of therapeutic protein drugs, such as erythropoietin, GM-CSF, interferon alpha and beta and human growth hormone, is frequently done to increase to alter a number of pharmacological properties, including, but not limited to, increased solubility, extended serum half-life, decreased dosage frequency, increased stability, decreased immunogenicity and enhanced protection from proteases.

[0237] As is known in the art, generally a number of PEG molecules are “loaded” onto each protein, depending on a number of factors, and the PEG molecules may be of varying length.

[0238] In general, the PEG moieties are covalently attached directly to the amino acid side chains of the PVRIG polypeptide, using activated PEG derivatives as is well known in the art. That is, generally no additional linkers are used, e.g. there are no extra atoms between the PEG and the amino acid side chain. In other embodiments, linkers such as those outlined below are used.

[0239] 4. Additional Heterologous Fusion Partners

[0240] In addition to half life extension fusion partner moieties, PVRIG polypeptides can be fused (generally but optionally using linkers as outlined herein), with heterologous polypeptide that give additional biochemical functionalities to the PVRIG polypeptides. These heterologous fusion partner moieties including, but are not limited to, receptors, hormones, cytokines, antigens, B-cell targets, NK cell targets, T cell targets, TNF receptor superfamily members, Hedgehog family members, a receptor tyrosine kinases, a proteoglycan-related molecules, a TGF-β superfamily members, Wnt-related molecules, receptor ligands, dendritic cell targets, myeloid cell targets, monocyte/macrophage cell targets or angiogenesis targets.

[0241] In some embodiments, the fusion partner is a T cell target selected from the group consisting of 2B4/SLAMF4, IL-2 Ra, 4-1BB/TNFRSF9, IL-2Rβ, ALCAM, B7-1/CD80, IL-4R, B7-H3, BLAME/SLAMF8, BTLA, IL-6R, CCR3, IL-7 Rα, CCR4, CXCR1/IL-8 RA, CCR5, CCR6, IL-10 R α, CCR7, IL-10 R13, CCR8, IL-12 Rβ1, CCR9, IL-12 Rβ2, CD2, IL-13Rα1, IL-13, CD3, CD4, ILT2/CD85j, ILT3/CD85k, ILT4/CD85d, ILT5/CD85a, Integrin α 4/CD49d, CD5, IntegrinαE/CD103, CD6, Integrin α M/CD11b, CD8, Integrin α X/CD11c, Integrin β2/CD18, KIR/CD158, CD27/TNFRSF7, KIR2DL1, CD28, KIR2DL3, CD30/TNFRSF8, KIR2DL4/CD158d, CD31/PECAM-1, KIR2DS4, CD40 Ligand/TNFSF5, LAG-3, CD43, LAIR1, CD45, LAIR2, CD83, Leukotriene B4 R1, CD84/SLAMF5, NCAM-L1, CD94, NKG2A, CD97, NKG2C, CD229/SLAMF3, NKG2D, CD2F-10/SLAMF9, NT-4, CD69, NTB-A/SLAMF6, Common γ Chain/IL-2 Rγ, Osteopontin, CRACC/SLAMF7, PD-1, CRTAM, PSGL-1, CTLA-4, RANK/TNFRSF11A, CX3CR1, CX3CL1, L-Selectin, CXCR3, SIRP (31, CXCR4, SLAM, CXCR6, TCCR/WSX-1, DNAM-1, Thymopoietin, EMMPRIN/CD147, TIM-1, EphB6, TIM-2, Fas/TNFRSF6, TIM-3, Fas Ligand/TNFSF6, TIM-4, Fcγ RIII/CD16, TIM-6, GITR/TNFRSF18, TNF R1/TNFRSF1A, Granulysin, TNF R11/TNFRSF1B, HVEM/TNFRSF14, TRAIL R1/TNFRSF10A, ICAM-1/CD54, TRAIL R2/TNFRSF10B, ICAM-2/CD102, TRAIL R3/TNFRSF10C, IFN-γR1, TRAIL R4/TNFRSF10D, IFN-γR2, TSLP, IL-1 RI and TSLP R.

[0242] In some embodiments, the heterologous fusion partner moiety is a T cell target protein. These proteins include, but are not limited to, 2B4/SLAMF4, IL-2 Ra, 4-1BB/TNFRSF9, IL-2Rβ, ALCAM, B7-1/CD80, IL-4R, B7-H3, BLAME/SLAMF8, BTLA, IL-6R, CCR3, IL-7 Ra, CCR4, CXCR1/IL-8 RA, CCR5, CCR6, IL-10 R α, CCR7, IL-10 RP, CCR8, IL-12 Rβ1, CCR9, IL-12 Rβ2, CD2, IL-13Rα1, IL-13, CD3, CD4, ILT2/CD85j, ILT3/CD85k, ILT4/CD85d, ILT5/CD85a, Integrin α 4/CD49d, CD5, IntegrinαE/CD103, CD6, Integrin α M/CD11b, CD8, Integrin α X/CD11c, Integrin (32/CD18, KIR/CD158, CD27/TNFRSF7, KIR2DL1, CD28, KIR2DL3, CD30/TNFRSF8, KIR2DL4/CD158d, CD31/PECAM-1, KIR2DS4, CD40 Ligand/TNFSF5, LAG-3, CD43, LAIR1, CD45, LAIR2, CD83, Leukotriene B4 R1, CD84/SLAMF5, NCAM-L1, CD94, NKG2A, CD97, NKG2C, CD229/SLAMF3, NKG2D, CD2F-10/SLAMF9, NT-4, CD69, NTB-A/SLAMF6, Common γ Chain/IL-2 Rγ, Osteopontin, CRACC/SLAMF7, PD-1, CRTAM, PSGL-1, CTLA-4, RANK/TNFRSF11A, CX3CR1, CX3CL1, L-Selectin, CXCR3, SIRP (31, CXCR4, SLAM, CXCR6, TCCR/WSX-1, DNAM-1, Thymopoietin, EMMPRIN/CD147, TIM-1, EphB6, TIM-2, Fas/TNFRSF6, TIM-3, Fas Ligand/TNFSF6, TIM-4, Fcγ RIII/CD16, TIM-6, GITR/TNFRSF18, TNF R1/TNFRSF1A, Granulysin, TNF R11/TNFRSF1B, HVEM/TNFRSF14, TRAIL R1/TNFRSF10A, ICAM-1/CD54, TRAIL R2/TNFRSF10B, ICAM-2/CD102, TRAIL R3/TNFRSF10C, IFN-γR1, TRAIL R4/TNFRSF10D, IFN-γR2, TSLP, IL-1 RI and TSLP R.

[0243] In some embodiments, the heterologous fusion partner moiety is a monocyte/macrophage cell target. These proteins include, but are not limited to, B7-1/CD80, ILT4/CD85d, B7-H1, ILT5/CD85a, Common 13 Chain, Integrin α 4/CD49d, BLAME/SLAMF8, Integrin α X/CD11c, CCL6/C10, Integrin β2/CD18, CD155/PVR, Integrin β3/CD61, CD31/PECAM-1, Latexin, CD36/SR-B3, Leukotriene B4 R1, CD40/TNFRSF5, LIMPII/SR-B2, CD43, LMIR1/CD300A, CD45, LMIR2/CD300c, CD68, LMIR3/CD300LF, CD84/SLAMF5, LMIR5/CD300LB, CD97, LMIR6/CD300LE, CD163, LRP-1, CD2F-10/SLAMF9, MARCO, CRACC/SLAMF7, MD-1, ECF-L, MD-2, EMMPRIN/CD147, MGL2, Endoglin/CD105, Osteoactivin/GPNMB, FcγR1/CD64, Osteopontin, Fcγ RIIB/CD32b, PD-L2, FcγRIIC/CD32c, Siglec-3/CD33, Fcγ RIIA/CD32a, SIGNR1/CD209, Fcγ RIII/CD16, SLAM, GM-CSF Rα, TCCR/WSX-1, ICAM-2/CD102, TLR3, IFN-γ R1, TLR4, IFN-γ R2, TREM-1, IL-1 RII, TREM-2, ILT2/CD85j, TREM-3, ILT3/CD85k, TREML1/TLT-1, 2B4/SLAMF4, IL-10 R α, ALCAM, IL-10 R (3, Aminopeptidase N/ANPEP, ILT2/CD85j, Common 13 Chain, ILT3/CD85k, C1q R1/CD93, ILT4/CD85d, CCR1, ILT5/CD85a, CCR2, Integrin α 4/CD49d, CCR5, Integrin α M/CD11b, CCR8, Integrin α X/CD11c, CD155/PVR, Integrin β 2/CD18, CD14, Integrin β 3/CD61, CD36/SR-B3, LAIR1, CD43, LAIR2, CD45, Leukotriene B4 R1, CD68, LIMPII/SR-B2, CD84/SLAMF5, LMIR1/CD300A, CD97, LMIR2/CD300c, CD163, LMIR3/CD300LF, Coagulation Factor III/Tissue Factor, LMIR5/CD300LB, CX3CR1, CX3CL1, LMIR6/CD300LE, CXCR4, LRP-1, CXCR6, M-CSF R, DEP-1/CD148, MD-1, DNAM-1, MD-2, EMMPRIN/CD147, MMR, Endoglin/CD105, NCAM-L1, Fcγ R1/CD64, PSGL-1, Fcγ RIII/CD16, RP105, G-CSF R, L-Selectin, GM-CSF Rα, Siglec-3/CD33, HVEM/TNFRSF14, SLAM, ICAM-1/CD54, TCCR/WSX-1, ICAM-2/CD102, TREM-1, IL-6 R, TREM-2, CXCR1/IL-8 RA, TREM-3 and TREML1/TLT-1.

[0244] In some embodiments, the heterologous fusion partner moiety is a Dendritic cell target, including, but not limited to, CD36/SR-B3, LOX-1/SR-E1, CD68, MARCO, CD163, SR-AI/MSR, CDSL, SREC-I, CL-P1/COLEC12, SREC-II, LIMPII/SR-B2, RP105, TLR4, TLR1, TLR5, TLR2, TLR6, TLR3, TLR9, 4-1BB Ligand/TNFSF9, IL-12/IL-23 p40, 4-Amino-1,8-naphthalimide, ILT2/CD85j, CCL21/6Ckine, ILT3/CD85k, 8-oxo-dG, ILT4/CD85d, 8D6A, ILT5/CD85a, A2B5, Integrin α 4/CD49d, Aag, Integrin β 2/CD18, AMICA, Langerin, B7-2/CD86, Leukotriene B4 R1, B7-H3, LMIR1/CD300A, BLAME/SLAMF8, LMIR2/CD300c, C1q R1/CD93, LMIR3/CD300LF, CCR6, LMIR5/CD300LB, CCR7, LMIR6/CD300LE, CD40/TNFRSF5, MAG/Siglec-4a, CD43, MCAM, CD45, MD-1, CD68, MD-2, CD83, MDL-1/CLEC5A, CD84/SLAMF5, MMR, CD97, NCAM-L1, CD2F-10/SLAMF9, Osteoactivin/GPNMB, Chem 23, PD-L2, CLEC-1, RP105, CLEC-2, Siglec-2/CD22, CRACC/SLAMF7, Siglec-3/CD33, DC-SIGN, Siglec-5, DC-SIGNR/CD299, Siglec-6, DCAR, Siglec-7, DCIR/CLEC4A, Siglec-9, DEC-205, Siglec-10, Dectin-1/CLEC7A, Siglec-F, Dectin-2/CLEC6A, SIGNR1/CD209, DEP-1/CD148, SIGNR4, DLEC, SLAM, EMMPRIN/CD147, TCCR/WSX-1, Fcγ R1/CD64, TLR3, Fcγ RIIB/CD32b, TREM-1, Fcγ RIIC/CD32c, TREM-2, Fcγ RIIA/CD32a, TREM-3, Fcγ RIII/CD16, TREML1/TLT-1, ICAM-2/CD102 and Vanilloid R1.

[0245] In some embodiments, the heterologous fusion partner moiety is a TNF receptor superfamily member, including, but not limited to, 4-1BB/TNFRSF9, NGF R/TNFRSF16, BAFF R/TNFRSF13C, Osteoprotegerin/TNFRSF11B, BCMA/TNFRSF17, OX40/TNFRSF4, CD27/TNFRSF7, RANK/TNFRSF11A, CD30/TNFRSF8, RELT/TNFRSF19L, CD40/TNFRSF5, TACI/TNFRSF13B, DcR3/TNFRSF6B, TNF RI/TNFRSF1A, DcTRAIL R1/TNFRSF23, TNF RIFTNFRSF1B, DcTRAIL R2/TNFRSF22, TRAIL R1/TNFRSF10A, DR3/TNFRSF25, TRAIL R2/TNFRSF10B, DR6/TNFRSF21, TRAIL R3/TNFRSF10C, EDAR, TRAIL R4/TNFRSF10D, Fas/TNFRSF6, TROY/TNFRSF19, GITR/TNFRSF18, TWEAK R/TNFRSF12, HVEM/TNFRSF14, XEDAR, Lymphotoxin βR/TNFRSF3, 4-1BB Ligand/TNFSF9, Lymphotoxin, APRIL/TNFSF13, Lymphotoxin β/TNFSF3, BAFF/TNFSF13C, OX40 Ligand/TNFSF4, CD27 Ligand/TNFSF7, TL1A/TNFSF15, CD30 Ligand/TNFSF8, TNF-α/TNFSF1A, CD40 Ligand/TNFSF5, TNF-β/TNFSF1B, EDA-A2, TRAIL/TNFSF10, Fas Ligand/TNFSF6, TRANCE/TNFSF11, GITR Ligand/TNFSF18, TWEAK/TNFSF12 and LIGHT/TNFSF14.

[0246] In some embodiments, the heterologous fusion partner moiety is a Hedgehog family member selected from the group consisting of Patched and Smoothened.

[0247] In some embodiments, the heterologous fusion partner moiety is a receptor tyrosine kinase including, but not limited to, Ax1, FGF R4, C1q R1/CD93, FGF R5, DDR1, Flt-3, DDR2, HGF R, Dtk, IGF-I R, EGF R, IGF-II R, Eph, INSRR, EphA1, Insulin R/CD220, EphA2, M-CSF R, EphA3, Mer, EphA4, MSP R/Ron, EphA5, MuSK, EphA6, PDGF R α, EphA7, PDGF EphA8, Ret, EphB1, ROR1, EphB2, ROR2, EphB3, SCF R/c-kit, EphB4, Tie-1, EphB6, Tie-2, ErbB2, TrkA, ErbB3, TrkB, ErbB4, TrkC, FGF R1, VEGF R1/Flt-1, FGF R2, VEGF R2/Flk-1, FGF R3 and VEGF R3/Flt-4.

[0248] In some embodiments, the heterologous fusion partner moiety is a Transforming Growth Factor (TGF)-β superfamily member selected from the group consisting of Activin RIA/ALK-2, GFR α-1, Activin RIB/ALK-4, GFR α2, Activin RHA, GFR α-3, Activin RIIB, GFR α-4, ALK-1, MIS RII, ALK-7, Ret, BMPR-IA/ALK-3, TGF-betβa R1/ALK-5, BMPR-IB/ALK-6, TGF-β RH, BMPR-II, TGF-β RIIb, Endoglin/CD 105 and TGF-β RIII.

[0249] In some embodiments, the heterologous fusion partner moiety is a Wnt-related molecule selected from the group consisting of Frizzled-1, Frizzled-8, Frizzled-2, Frizzled-9, Frizzled-3, sFRP-1, Frizzled-4, sFRP-2, Frizzled-5, sFRP-3, Frizzled-6, sFRP-4, Frizzled-7, MFRP, LRP 5, LRP 6, Wnt-1, Wnt-8a, Wnt-3a, Wnt-10b, Wnt-4, Wnt-11, Wnt-5a, Wnt-9a and Wnt-7a.

[0250] In some embodiments, the heterologous fusion partner moiety is a receptor ligand selected from the group consisting of 4-1BB Ligand/TNFSF9, Lymphotoxin, APRIL/TNFSF13, Lymphotoxin β/TNFSF3, BAFF/TNFSF13C, OX40 Ligand/TNFSF4, CD27 Ligand/TNFSF7, TL1A/TNFSF15, CD30 Ligand/TNFSF8, TNF-α/TNFSF1A, CD40 Ligand/TNFSF5, TNF-β/TNFSF1B, EDA-A2, TRAIL/TNFSF10, Fas Ligand/TNFSF6, TRANCE/TNFSF11, GITR Ligand/TNFSF18, TWEAK/TNFSF12, LIGHT/TNFSF14, Amphiregulin, NRG1 isoform GGF2, Betacellulin, NRG1 Isoform SMDF, EGF, NRG1-α/HRG1-α, Epigen, NRG1-β1/HRG1-β1, Epiregulin, TGF-α, HB-EGF, TMEFF1/Tomoregulin-1, Neuregulin-3, TMEFF2, IGF-I, IGF-II, Insulin, Activin A, Activin B, Activin AB, Activin C, BMP-2, BMP-7, BMP-3, BMP-8, BMP-3b/GDF-10, BMP-9, BMP-4, BMP-15, BMP-5, Decapentaplegic, BMP-6, GDF-1, GDF-8, GDF-3, GDF-9, GDF-5, GDF-11, GDF-6, GDF-15, GDF-7, Artemin, Neurturin, GDNF, Persephin, TGF-β, TGF-β2, TGF-β1, TGF-β3, LAP (TGF-β1), TGF-β5, Latent TGF-β1, Latent TGF-β bp1, TGF-β1.2, Lefty, Nodal, MIS/AMH, FGF acidic, FGF-12, FGF basic, FGF-13, FGF-3, FGF-16, FGF-4, FGF-17, FGF-5, FGF-19, FGF-6, FGF-20, FGF-8, FGF-21, FGF-9, FGF-23, FGF-10, KGF/FGF-7, FGF-11, Neuropilin-1, P1GF, Neuropilin-2, P1GF-2, PDGF, PDGF-A, VEGF, PDGF-B, VEGF-B, PDGF-C, VEGF-C, PDGF-D, VEGF-D and PDGF-AB.

[0251] In some embodiments, the heterologous fusion partner moiety is a tumor antigen selected from the group consisting of Squamous Cell Carcinoma Antigen 1 (SCCA-1), (PROTEIN T4-A), Squamous Cell Carcinoma Antigen 2 (SCCA-2), Ovarian carcinoma antigen CA125 (1A1-3B; KIAA0049), MUCIN 1 (TUMOR-ASSOCIATED MUCIN; Carcinoma-Associated Mucin; Polymorphic Epithelial Mucin; PEM; PEMT; EPISIALIN; Tumor-Associated Epithelial Membrane Antigen; EMA; H23AG; Peanut-Reactive Urinary Mucin; PUM; and Breast Carcinoma-Associated Antigen DF3), CTCL tumor antigen sel-1, CTCL tumor antigen se14-3, CTCL tumor antigen se20-4, CTCL tumor antigen se20-9, CTCL tumor antigen se33-1, CTCL tumor antigen se37-2, CTCL tumor antigen se57-1, CTCL tumor antigen se89-1, Prostate-specific membrane antigen, 5T4 oncofetal trophoblast glycoprotein, Orf73 Kaposi's sarcoma-associated herpesvirus, MAGE-C1 (cancer/testis antigen CT7), MAGE-B1 ANTIGEN (MAGE-XP Antigen; DAM10), MAGE-B2 Antigen (DAM6), MAGE-2 ANTIGEN, MAGE-4a antigen, MAGE-4b antigen, Colon cancer antigen NY-CO-45, Lung cancer antigen NY-LU-12 variant A, Cancer associated surface antigen, Adenocarcinoma antigen ART1, Paraneoplastic associated brain-testis-cancer antigen (onconeuronal antigen MA2; paraneoplastic neuronal antigen), Neuro-oncological ventral antigen 2 (NOVA2), Hepatocellular carcinoma antigen gene 520, Tumor-Associated Antigen CO-029, Tumor-associated antigen MAGE-X2, Synovial sarcoma, X breakpoint 2, Squamous cell carcinoma antigen recognized by T cell, Serologically defined colon cancer antigen 1, Serologically defined breast cancer antigen NY-BR-15, Serologically defined breast cancer antigen NY-BR-16, Chromogranin A, parathyroid secretory protein 1, DUPAN-2, CA 19-9, CA 72-4, CA 195 and L6.

[0252] In some embodiments, the heterologous fusion partner moiety is a B cell target selected from the group consisting of CD10, CD19, CD20, CD21, CD22, CD23, CD24, CD37, CD38, CD39, CD40, CD72, CD73, CD74, CDw75, CDw76, CD77, CD78, CD79a/b, CD80, CD81, CD82, CD83, CD84, CD85, CD86, CD89, CD98, CD126, CD127, CDw130, CD138 and CDw150.

[0253] In some embodiments, the heterologous fusion partner moiety is n angiogenesis target selected from the group consisting of Angiopoietin-1, Angiopoietin-like 2, Angiopoietin-2, Angiopoietin-like 3, Angiopoietin-3, Angiopoietin-like 7/CDT6, Angiopoietin-4, Tie-1, Angiopoietin-like 1, Tie-2, Angiogenin, iNOS, Coagulation Factor III/Tissue Factor, nNOS, CTGF/CCN2, NOV/CCN3, DANCE, OSM, EDG-1, Plfr, EG-VEGF/PK1, Proliferin, Endostatin, ROBO4, Erythropoietin, Thrombospondin-1, Kininostatin, Thrombospondin-2, MFG-E8, Thrombospondin-4, Nitric Oxide, VG5Q, eNOS, EphA1, EphA5, EphA2, EphA6, EphA3, EphA7, EphA4, EphA8, EphB1, EphB4, EphB2, EphB6, EphB3, Ephrin-A1, Ephrin-A4, Ephrin-A2, Ephrin-A5, Ephrin-A3, Ephrin-B1, Ephrin-B3, Ephrin-B2, FGF acidic, FGF-12, FGF basic, FGF-13, FGF-3, FGF-16, FGF-4, FGF-17, FGF-5, FGF-19, FGF-6, FGF-20, FGF-8, FGF-21, FGF-9, FGF-23, FGF-10, KGF/FGF-7, FGF-11, FGF R1, FGF R4, FGF R2, FGF R5, FGF R3, Neuropilin-1, Neuropilin-2, Semaphorin 3A, Semaphorin 6B, Semaphorin 3C, Semaphorin 6C, Semaphorin 3E, Semaphorin 6D, Semaphorin 6A, Semaphorin 7A, MMP, MMP-11, MMP-1, MMP-12, MMP-2, MMP-13, MMP-3, MMP-14, MMP-7, MMP-15, MMP-8, MMP-16/MT3-MMP, MMP-9, MMP-24/MT5-MMP, MMP-10, MMP-25/MT6-MMP, TIMP-1, TIMP-3, TIMP-2, TIMP-4, ACE, IL-13 R α1, IL-13, C1q R1/CD93, Integrin α 4/CD49d, VE-Cadherin, Integrin β2/CD18, CD31/PECAM-1, KLF4, CD36/SR-B3, LYVE-1, CD151, MCAM, CL-P1/COLEC12, Nectin-2/CD112, Coagulation Factor III/Tissue Factor, E-Selectin, D6, P-Selectin, DC-SIGNR/CD299, SLAM, EMMPRIN/CD147, Tie-2, Endoglin/CD105, TNF RI/TNFRSF1A, EPCR, TNF RII/TNFRSF1B, Erythropoietin R, TRAIL R1/TNFRSF10A, ESAM, TRAIL R2/TNFRSF10B, FABP5, VCAM-1, ICAM-1/CD54, VEGF R2/Flk-1, ICAM-2/CD102, VEGF R3/Flt-4, IL-1 RI and VG5Q.

[0254] B. Linkers

[0255] In many embodiments of fusion proteins comprising a PVRIG polypeptide and a fusion partner moiety, optional flexible linkers are used to join the sequences in frame. A “flexible linker” herein refers to a peptide or polypeptide containing two or more amino acid residues joined by peptide bond(s) that provides increased rotational freedom for two polypeptides linked thereby than the two linked polypeptides would have in the absence of the flexible linker. Such rotational freedom allows each component of the fusion protein to interact with its intended target without hindrance. Generally these linkers are mixtures of glycine and serine, such as -(GGGS)n-, where n is from 1, 2, 3, 4, or 5 (SEQ ID NO:1).

[0256] Exemplary flexible peptides/polypeptides include, but are not limited to, the amino acid sequences shown in FIG. 105. Additional flexible peptide/polypeptide sequences are well known in the art. Other suitable peptide linker domains optionally include the TEV linker ENLYFQG (SEQ ID NO:2), a linear epitope recognized by the Tobacco Etch Virus protease. Exemplary peptides/polypeptides include, but are not limited to, GSENLYFQGSG (SEQ ID NO:84). Other suitable peptide linker domains include helix forming linkers such as Ala-(Glu-Ala-Ala-Ala-Lys)n-Ala (n=1-5) (SEQ ID NO:4). Additional helix forming peptide/polypeptide sequences are well known in the art.

[0257] C. Particular Constructs

[0258] In one embodiment, the linker domain contains the hinge region of an immunoglobulin. In a further embodiment, the hinge region is derived from a human immunoglobulin. Suitable human immunoglobulins that the hinge can be derived from include IgG, IgD and IgA. In a further embodiment, the hinge region is derived from human IgG. Amino acid sequences of immunoglobulin hinge regions and other domains are well known in the art. In one embodiment, PVRIG fusion polypeptides contain the hinge, CH2 and CH3 regions of a human immunoglobulin Cγ1 chain, optionally with the Cys at position 220 (according to full length human IgG1, position 5 in SEQ ID NO:1354) replaced with a Ser)

[0259] BF) having at least 85%, 90%, 95%, 99% or 100% sequence homology to amino acid sequence set forth in SEQ ID NO:5:

EPKSCDKTHTCPPCPAPELLGGPSVFLFPPKPKDTLMISRTPEVTCVVVD
VSHEDPEVKFNWYVDGVEVHNAKTKPREEQYNSTYRVVSVLTVLHQDWLN
GKEYKCKVSNKALPAPIEKTISKAKGQPREPQVYTLPPSRDELTKNQVSL
TCLVKGFYPSDIAVEWESNGQPENNYKTTPPVLDSDGSFFLYSKLTVDKS
RWQQGNVFSCSVMHEALHNHYTQKSLSLSPGK.

[0260] The hinge can be further shortened to remove amino acids 1, 2, 3, 4, 5, or combinations thereof of any one of BE to BG and. In one embodiment, amino acids 1-5 of any one of BE to BG are deleted. Exemplary PVRIG fusion polypeptides comprised of the hinge, CH2 and CH3 regions of a human immunoglobulin Cγ1 chain with the Cys at position 220 replaced with a Ser are set forth inAZ.

[0261] In another embodiment, the PVRIG fusion polypeptides contain the CH2 and CH3 regions of human immunoglobulin Cγ1 chain having N297A mutation (BG) or the human Fc carrying the C220S, C226 and C229S mutations (BL).

[0262] In another embodiment, PVRIG fusion polypeptides contain the CH2 and CH3 regions of a human immunoglobulin Cγ1 chain having at least 85%, 90%, 95%, 99% or 100% sequence homology to amino acid sequence set forth in BH:

(SEQ ID NO: 6)
APELLGGPSVFLFPPKPKDTLMISRTPEVTCVVVDVSHEDPEVKFNWYVD
GVEVHNAKTKPREEQYNSTYRVVSVLTVLHQDWLNGKEYKCKVSNKALPA
PIEKTISKAKGQPREPQVYTLPPSRDELTKNQVSLTCLVKGFYPSDIAVE
WESNGQPENNYKTTPPVLDSDGSFFLYSKLTVDKSRWQQGNVFSCSVMHE
ALHNHYTQKSLSLSPGK

[0263] In another embodiment, the PVRIG fusion polypeptides contain the hinge, CH2 and CH3 regions of a murine immunoglobulin Cγ2a chain at least 85%, 90%, 95%, 99% or 100% sequence homology to amino acid sequence set forth in BI:

(SEQ ID NO: 7)
EPRGPTIKPCPPCKCPAPNLLGGPSVFIFPPKIKDVLMISLSPIVTCVVV
DVSEDDPDVQISWFVNNVEVHTAQTQTHREDYNSTLRVVSALPIQHQDWM
SGKEFKCKVNNKDLPAPIERTISKPKGSVRAPQVYVLPPPEEEMTKKQVT
LTCMVTDFMPEDIYVEWTNNGKTELNYKNTEPVLDSDGSYFMYSKLRVEK
KNWVERNSYSCSVVHEGLHNHHTTKSFSRTPGK

[0264] In another embodiment, the PVRIG fusion polypeptides contain the CH2 and CH3 regions of a murine immunoglobulin Cγ2a chain having N297A mutation (BJ) or the murine Fc without the Hinge (BK).

[0265] In another embodiment, the linker domain optionally contains a hinge region of an immunoglobulin as described above, and further includes one or more additional immunoglobulin domains.

### VI. Nucleic Acid Compositions

[0266] Nucleic acid compositions encoding the PVRIG polypeptides of the invention are also provided, as well as expression vectors containing the nucleic acids and host cells transformed with the nucleic acid and/or expression vector compositions.

[0267] The nucleic acid compositions that encode the PVRIG polypeptides are generally put into a single expression vectors is known in the art, transformed into host cells, where they are expressed to form the PVRIG proteins (or fusion proteins) of the invention. The nucleic acids can be put into expression vectors that contain the appropriate transcriptional and translational control sequences, including, but not limited to, signal and secretion sequences, regulatory sequences, promoters, origins of replication, selection genes, etc.

[0268] For example, to express the protein DNA, DNAs can be obtained by standard molecular biology techniques (e.g., PCR amplification or gene synthesis) and the DNAs can be inserted into expression vectors such that the genes are operatively linked to transcriptional and translational control sequences. In this context, the term “operatively linked” is intended to mean that an antibody gene is ligated into a vector such that transcriptional and translational control sequences within the vector serve their intended function of regulating the transcription and translation of the antibody gene. The expression vector and expression control sequences are chosen to be compatible with the expression host cell used. The protein genes are inserted into the expression vector by standard methods (e.g., ligation of complementary restriction sites on the gene fragment and vector, or blunt end ligation if no restriction sites are present). Additionally or alternatively, the recombinant expression vector can encode a signal peptide that facilitates secretion of the protein (including fusion proteins) from a host cell. The gene can be cloned into the vector such that the signal peptide is linked in-frame to the amino terminus of the gene. The signal peptide can be an immunoglobulin signal peptide or a heterologous signal peptide (i.e., a signal peptide from a non-immunoglobulin protein).

[0269] In addition to the protein genes, the recombinant expression vectors according to at least some embodiments of the invention carry regulatory sequences that control the expression of the genes in a host cell. The term “regulatory sequence” is intended to include promoters, enhancers and other expression control elements (e.g., polyadenylation signals) that control the transcription or translation of the genes. Such regulatory sequences are described, for example, in Goeddel (“Gene Expression Technology”, Methods in Enzymology 185, Academic Press, San Diego, Calif. (1990)). It will be appreciated by those skilled in the art that the design of the expression vector, including the selection of regulatory sequences, may depend on such factors as the choice of the host cell to be transformed, the level of expression of protein desired, etc. Preferred regulatory sequences for mammalian host cell expression include viral elements that direct high levels of protein expression in mammalian cells, such as promoters and/or enhancers derived from cytomegalovirus (CMV), Simian Virus 40 (SV40), adenovirus, (e.g., the adenovirus major late promoter (AdMLP) and polyoma. Alternatively, nonviral regulatory sequences may be used, such as the ubiquitin promoter or β-globin promoter. Still further, regulatory elements composed of sequences from different sources, such as the SR α. promoter system, which contains sequences from the SV40 early promoter and the long terminal repeat of human T cell leukemia virus type 1 (Takebe, Y. et al. (1988) Mol. Cell. Biol. 8:466-472).

[0270] In addition to the protein genes and regulatory sequences, the recombinant expression vectors according to at least some embodiments of the invention may carry additional sequences, such as sequences that regulate replication of the vector in host cells (e.g., origins of replication) and selectable marker genes. The selectable marker gene facilitates selection of host cells into which the vector has been introduced (see, e.g., U.S. Pat. Nos. 4,399,216, 4,634,665 and 5,179,017, all by Axel et al.). For example, typically the selectable marker gene confers resistance to drugs, such as G418, hygromycin or methotrexate, on a host cell into which the vector has been introduced. Preferred selectable marker genes include the dihydrofolate reductase (DHFR) gene (for use in dhfr-host cells with methotrexate selection/amplification) and the neo gene (for G418 selection).

[0271] For expression of the proteins of the invention, an expression vector encoding the protein is transfected into a host cell by standard techniques. The various forms of the term “transfection” are intended to encompass a wide variety of techniques commonly used for the introduction of exogenous DNA into a prokaryotic or eukaryotic host cell, e.g., electroporation, calcium-phosphate precipitation, DEAE-dextran transfection and the like. Although it is theoretically possible to express the proteins according to at least some embodiments of the invention in either prokaryotic or eukaryotic host cells, expression of antibodies in eukaryotic cells, and most preferably mammalian host cells, is the most preferred.

[0272] Preferred mammalian host cells for expressing the recombinant proteins according to at least some embodiments of the invention include Chinese Hamster Ovary (CHO cells) (including dhfr-CHO cells, described in Urlaub and Chasin, (1980) Proc. Natl. Acad. Sci. USA 77:4216-4220, used with a DHFR selectable marker, e.g., as described in R. J. Kaufman and P. A. Sharp (1982) Mol. Biol. 159:601-621), NSO myeloma cells, COS cells and SP2 cells. In particular, for use with NSO myeloma cells, another preferred expression system is the GS gene expression system disclosed in WO 87/04462, WO 89/01036 and EP 338,841. When recombinant expression vectors encoding protein genes are introduced into mammalian host cells, the proteins are produced by culturing the host cells for a period of time sufficient to allow for expression of the protein in the host cells or, more preferably, secretion of the protein into the culture medium in which the host cells are grown. Antibodies can be recovered from the culture medium using standard protein purification methods.

[0273] PVRIG protein coding sequences of interest include those encoded by native sequences, as well as nucleic acids that, by virtue of the degeneracy of the genetic code, are not identical in sequence to the disclosed nucleic acids, and variants thereof. Variant polypeptides can include amino acid substitutions as discussed herein. Techniques for in vitro mutagenesis of cloned genes are known. Also included in the subject invention are polypeptides that have been modified using ordinary molecular biological techniques so as to improve their resistance to proteolytic degradation or to optimize solubility properties or to render them more suitable as a therapeutic agent.

[0274] The invention further provides nucleic acids which encode a PVRIG protein according to the invention, or a fragment or conjugate thereof. The nucleic acids may be present in whole cells, in a cell lysate, or in a partially purified or substantially pure form. A nucleic acid is “isolated” or “rendered substantially pure” when purified away from other cellular components or other contaminants, e.g., other cellular nucleic acids or proteins, by standard techniques, including alkaline/SDS treatment, CsCl banding, column chromatography, agarose gel electrophoresis and others well known in the art. See, F. Ausubel, et al., ed. (1987) Current Protocols in Molecular Biology, Greene Publishing and Wiley Interscience, New York. A nucleic acid according to at least some embodiments of the invention can be, for example, DNA or RNA and may or may not contain intronic sequences.

### VII. Formulations

[0275] The therapeutic compositions used in the practice of the foregoing methods can be formulated into pharmaceutical compositions comprising a carrier suitable for the desired delivery method. Suitable carriers include any material that when combined with the therapeutic composition retains the anti-tumor function of the therapeutic composition and is generally non-reactive with the patient's immune system. Examples include, but are not limited to, any of a number of standard pharmaceutical carriers such as sterile phosphate buffered saline solutions, bacteriostatic water, and the like (see, generally, Remington's Pharmaceutical Sciences 16^{th} Edition, A. Osal., Ed., 1980). Acceptable carriers, excipients, or stabilizers are nontoxic to recipients at the dosages and concentrations employed, and include buffers such as phosphate, citrate, acetate, and other organic acids; antioxidants including ascorbic acid and methionine; preservatives (such as octadecyldimethylbenzyl ammonium chloride; hexamethonium chloride; benzalkonium chloride, benzethonium chloride; phenol, butyl or benzyl alcohol; alkyl parabens such as methyl or propyl paraben; catechol; resorcinol; cyclohexanol; 3-pentanol; and m-cresol); low molecular weight (less than about 10 residues) polypeptides; proteins, such as serum albumin, gelatin, or immunoglobulins; hydrophilic polymers such as polyvinylpyrrolidone; amino acids such as glycine, glutamine, asparagine, histidine, arginine, or lysine; monosaccharides, disaccharides, and other carbohydrates including glucose, mannose, or dextrins; chelating agents such as EDTA; sugars such as sucrose, mannitol, trehalose or sorbitol; sweeteners and other flavoring agents; fillers such as microcrystalline cellulose, lactose, corn and other starches; binding agents; additives; coloring agents; salt-forming counter-ions such as sodium; metal complexes (e.g. Zn-protein complexes); and/or non-ionic surfactants such as TWEEN™, PLURONICS™ or polyethylene glycol (PEG).

[0276] In a preferred embodiment, the pharmaceutical composition that comprises the antibodies of the invention may be in a water-soluble form, such as being present as pharmaceutically acceptable salts, which is meant to include both acid and base addition salts. “Pharmaceutically acceptable acid addition salt” refers to those salts that retain the biological effectiveness of the free bases and that are not biologically or otherwise undesirable, formed with inorganic acids such as hydrochloric acid, hydrobromic acid, sulfuric acid, nitric acid, phosphoric acid and the like, and organic acids such as acetic acid, propionic acid, glycolic acid, pyruvic acid, oxalic acid, maleic acid, malonic acid, succinic acid, fumaric acid, tartaric acid, citric acid, benzoic acid, cinnamic acid, mandelic acid, methanesulfonic acid, ethanesulfonic acid, p-toluenesulfonic acid, salicylic acid and the like. “Pharmaceutically acceptable base addition salts” include those derived from inorganic bases such as sodium, potassium, lithium, ammonium, calcium, magnesium, iron, zinc, copper, manganese, aluminum salts and the like. Particularly preferred are the ammonium, potassium, sodium, calcium, and magnesium salts. Salts derived from pharmaceutically acceptable organic non-toxic bases include salts of primary, secondary, and tertiary amines, substituted amines including naturally occurring substituted amines, cyclic amines and basic ion exchange resins, such as isopropylamine, trimethylamine, diethylamine, triethylamine, tripropylamine, and ethanolamine. The formulations to be used for in vivo administration are preferrably sterile. This is readily accomplished by filtration through sterile filtration membranes or other methods.

[0277] Administration of the pharmaceutical composition comprising antibodies of the present invention, preferably in the form of a sterile aqueous solution, may be done in a variety of ways, including, but not limited to subcutaneously and intravenously. Subcutaneous administration may be preferable in some circumstances because the patient may self-administer the pharmaceutical composition. Many protein therapeutics are not sufficiently potent to allow for formulation of a therapeutically effective dose in the maximum acceptable volume for subcutaneous administration. This problem may be addressed in part by the use of protein formulations comprising arginine-HCl, histidine, and polysorbate (see WO 04091658). Fc polypeptides of the present invention may be more amenable to subcutaneous administration due to, for example, increased potency, improved serum half-life, or enhanced solubility.

[0278] As is known in the art, protein therapeutics are often delivered by IV infusion or bolus. The antibodies of the present invention may also be delivered using such methods. For example, administration may venious be by intravenous infusion with 0.9% sodium chloride as an infusion vehicle.

[0279] In addition, any of a number of delivery systems are known in the art and may be used to administer the Fc variants of the present invention. Examples include, but are not limited to, encapsulation in liposomes, microparticles, microspheres (eg. PLA/PGA microspheres), and the like. Alternatively, an implant of a porous, non-porous, or gelatinous material, including membranes or fibers, may be used. Sustained release systems may comprise a polymeric material or matrix such as polyesters, hydrogels, poly(vinylalcohol), polylactides, copolymers of L-glutamic acid and ethyl-L-gutamate, ethylene-vinyl acetate, lactic acid-glycolic acid copolymers such as the LUPRON DEPOT®, and poly-D-(−)-3-hydroxyburyric acid. The antibodies disclosed herein may also be formulated as immunoliposomes. A liposome is a small vesicle comprising various types of lipids, phospholipids and/or surfactant that is useful for delivery of a therapeutic agent to a mammal. Liposomes containing the antibody are prepared by methods known in the art, such as described in Epstein et al., 1985, Proc Natl Acad Sci USA, 82:3688; Hwang et al., 1980, Proc Natl Acad Sci USA, 77:4030; U.S. Pat. No. 4,485,045; U.S. Pat. No. 4,544,545; and PCT WO 97/38731. Liposomes with enhanced circulation time are disclosed in U.S. Pat. No. 5,013,556. The components of the liposome are commonly arranged in a bilayer formation, similar to the lipid arrangement of biological membranes. Particularly useful liposomes can be generated by the reverse phase evaporation method with a lipid composition comprising phosphatidylcholine, cholesterol and PEG-derivatized phosphatidylethanolamine (PEG-PE). Liposomes are extruded through filters of defined pore size to yield liposomes with the desired diameter. A chemotherapeutic agent or other therapeutically active agent is optionally contained within the liposome (Gabizon et al., 1989, J National Cancer Inst 81:1484).

[0280] The antibodies may also be entrapped in microcapsules prepared by methods including but not limited to coacervation techniques, interfacial polymerization (for example using hydroxymethylcellulose or gelatin-microcapsules, or poly-(methylmethacylate) microcapsules), colloidal drug delivery systems (for example, liposomes, albumin microspheres, microemulsions, nano-particles and nanocapsules), and macroemulsions. Such techniques are disclosed in Remington's Pharmaceutical Sciences 16th edition, Osol, A. Ed., 1980. Sustained-release preparations may be prepared. Suitable examples of sustained-release preparations include semipermeable matrices of solid hydrophobic polymer, which matrices are in the form of shaped articles, e.g. films, or microcapsules. Examples of sustained-release matrices include polyesters, hydrogels (for example poly(2-hydroxyethyl-methacrylate), or poly(vinylalcohol)), polylactides (U.S. Pat. No. 3,773,919), copolymers of L-glutamic acid and gamma ethyl-L-glutamate, non-degradable ethylene-vinyl acetate, degradable lactic acid-glycolic acid copolymers such as the LUPRON DEPOT® (which are injectable microspheres composed of lactic acid-glycolic acid copolymer and leuprolide acetate), poly-D-(−)-3-hydroxybutyric acid, and ProLease® (commercially available from Alkermes), which is a microsphere-based delivery system composed of the desired bioactive molecule incorporated into a matrix of poly-DL-lactide-co-glycolide (PLG).

[0281] The dosing amounts and frequencies of administration are, in a preferred embodiment, selected to be therapeutically or prophylactically effective. As is known in the art, adjustments for protein degradation, systemic versus localized delivery, and rate of new protease synthesis, as well as the age, body weight, general health, sex, diet, time of administration, drug interaction and the severity of the condition may be necessary, and will be ascertainable with routine experimentation by those skilled in the art.

[0282] The concentration of the antibody in the formulation may vary from about 0.1 to 100 weight %. In a preferred embodiment, the concentration of the Fc variant is in the range of 0.003 to 1.0 molar. In order to treat a patient, a therapeutically effective dose of the Fc variant of the present invention may be administered. By “therapeutically effective dose” herein is meant a dose that produces the effects for which it is administered. The exact dose will depend on the purpose of the treatment, and will be ascertainable by one skilled in the art using known techniques. Dosages may range from 0.0001 to 100 mg/kg of body weight or greater, for example 0.1, 1, 10, or 50 mg/kg of body weight, with 1 to 10 mg/kg being preferred.

### VIII. Methods of Using Compositions of the Invention in Treatment

[0283] As discussed herein, PVRIG is involved in the immuno-oncology pathway, which means that manipulating certain signaling pathways can have two different effects. On one hand, the PVRIG protein suppresses T cell activation and one or more of a number of other pathways, through binding to its ligands, including PVLR2. Thus, by inhibiting the interaction of PVRIG and PVLR2, for example using antibodies to PVRIG, the suppression is alleviated, thereby increasing an immune response to allow treatment of conditions for which a stronger immune response is desired, such as cancer and pathogen infection. This is referred to as a “immuno-stimulatory” response. On the other hand, by increasing the amount of PVRIG in a patient, such as by adding PVRIG ECD polypeptides, the suppression is increased, thereby decreasing the immune response to allow treatment of conditions for which a decreased immune response is desired, such as autoimmune diseases and inflammation.

[0284] Accordingly, once made, the PVRIG proteins of the invention find use in a variety of applications, including using them in screening assays for additional immunomodulatory agents, as well as treatment of patients as is more fully outlined below.

[0285] With regard to the immuno-stimulatory treatments using anti-PVRIG antibodies, reference is made to U.S. Ser. No. 15/048,967, filed Feb. 19, 2016, entitled “Anti-PVRIG Antibodies and Methods of Use, claiming priority to U.S. Ser. No. 62/118,208, filed Feb. 19, 2015, and to U.S. Ser. No. 62/141,120, filed Mar. 31, 2015, and to U.S. Ser. No. 62/235,823, filed Oct. 1, 2015, all of which is expressly incorporated by reference in its entirety herein.

[0286] A. Treatment

[0287] The present invention provides methods of treating a number of diseases and/or conditions associated with an immune condition. An “immune condition” includes patients who would benefit from immunostimulatory action, such as cancer or pathogen infection, as well as patients who would benefit from immunoinhibitory action, such as autoimmune diseases and inflammation.

[0288] In some embodiments, the PVRIG polypeptides of the invention are used to treat autoimmune diseases. Suitable autoimmune diseases include, but are not limited to, multiple sclerosis, including relapsing-remitting multiple sclerosis, primary progressive multiple sclerosis, and secondary progressive multiple sclerosis, progressive relapsing multiple sclerosis, chronic progressive multiple sclerosis, transitional/progressive multiple sclerosis, rapidly worsening multiple sclerosis, clinically-definite multiple sclerosis, malignant multiple sclerosis, also known as Marburg's Variant, acute multiple sclerosis, conditions relating to multiple sclerosis, psoriasis, rheumatoid arthritis, psoriatic arthritis, gout and pseudo-gout, juvenile idiopathic arthritis, Still's disease, rheumatoid vasculitis, conditions relating to rheumatoid arthritis, discoid lupus erythematosus, lupus arthritis, lupus pneumonitis, lupus nephritis, conditions relating to systemic lupus erythematosus include osteoarticular tuberculosis, antiphospholipid antibody syndrome, systemic lupus erythematosus (SLE); discoid lupus erythematosus, inflammatory bowel disease, ulcerative colitis, Crohn's disease, benign lymphocytic angiitis, thrombocytopenic purpura, idiopathic thrombocytopenia, idiopathic autoimmune hemolytic anemia, pure red cell aplasia, Sjögren's syndrome, rheumatic disease, connective tissue disease, inflammatory rheumatism, degenerative rheumatism, extra-articular rheumatism, juvenile rheumatoid arthritis, arthritis uratica, muscular rheumatism, chronic polyarthritis, cryoglobulinemic vasculitis, ANCA-associated vasculitis, antiphospholipid syndrome, myasthenia gravis, autoimmune hemolytic anaemia, Guillain-Barré syndrome, chronic immune polyneuropathy, autoimmune thyroiditis, insulin dependent diabetes mellitus, type I diabetes, Addison's disease, membranous glomerulonephropathy, Goodpasture's disease, autoimmune gastritis, autoimmune atrophic gastritis, pernicious anaemia, pemphigus, pemphigus vulgaris, cirrhosis, primary biliary cirrhosis, dermatomyositis, polymyositis, fibromyositis, myogelosis, celiac disease, immunoglobulin A nephropathy, Henoch-Schonlein purpura, Evans syndrome, Dermatitis, atopic dermatitis, psoriasis, psoriasis arthropathica, Graves' disease, Graves' ophthalmopathy, scleroderma, systemic scleroderma, progressive systemic scleroderma, asthma, allergy, primary biliary cirrhosis, Hashimoto's thyroiditis, primary myxedema, sympathetic ophthalmia, autoimmune uveitis, anterior uveitis (or iridocyclitis), intermediate uveitis (pars planitis), posterior uveitis (or chorioretinitis), panuveitis form, hepatitis, chronic action hepatitis, collagen diseases, ankylosing spondylitis, periarthritis humeroscapularis, panarteritis nodosa, chondrocalcinosis, Wegener's granulomatosis, microscopic polyangiitis, chronic urticaria, bullous skin disorders, pemphigoid, bullous pemphigoid, cicatricial pemphigoid, vitiligo, atopic eczema, eczema, chronic urticaria, autoimmune urticaria, normocomplementemic urticarial vasculitis, hypocomplementemic urticarial vasculitis, autoimmune lymphoproliferative syndrome, Devic's disease, sarcoidosis, pernicious anemia, childhood autoimmune hemolytic anemia, idiopathic autoimmune hemolytic anemia, Refractory or chronic Autoimmune Cytopenias, Prevention of development of Autoimmune Anti-Factor VIII Antibodies in Acquired Hemophilia A, Cold Agglutinin Disease, Neuromyelitis Optica, Stiff Person Syndrome, gingivitis, periodontitis, pancreatitis, myocarditis, vasculitis, gastritis, gout, gouty arthritis, and inflammatory skin disorders, selected from the group consisting of psoriasis, atopic dermatitis, eczema, rosacea, urticaria, and acne, normocomplementemic urticarial vasculitis, inflammation of various parts of the heart, such as pericarditis, myocarditis, and endocarditis, lung and pleura inflammation, pleuritis, pleural effusion, chronic diffuse interstitial lung disease, pulmonary hypertension, pulmonary emboli, pulmonary hemorrhage, and shrinking lung syndrome, lupus headache, idiopathic pericarditis, myositis, demyelinating syndrome, mononeuropathy, mononeuritis multiplex, myelopathy, cranial neuropathy, polyneuropathy, collagenous colitis, lymphocytic colitis, ischaemia colitis, diversion colitis, indeterminate colitis, idiopathic autoimmune hemolytic anemia, anti-synthetase syndrome, scleritis, macrophage activation syndrome, Behçet's Syndrome, PAPA Syndrome, Blau's Syndrome, gout, gouty arthritis, inflammatory skin disorders selected from the group consisting of psoriasis, Non pustular Psoriasis including Psoriasis vulgaris and Psoriatic erythroderma (erythrodermic psoriasis), Pustular psoriasis including Generalized pustular psoriasis (pustular psoriasis of von Zumbusch), Pustulosis palmaris et plantaris (persistent palmoplantar pustulosis, pustular psoriasis of the Barber type, pustular psoriasis of the extremities), Annular pustular psoriasis, Acrodermatitis continua, Impetigo herpetiformis, drug-induced psoriasis, Inverse psoriasis, Napkin psoriasis, Seborrheic-like psoriasis, Guttate psoriasis, Nail psoriasis, eczema, rosacea, urticaria, and acne, normocomplementemic urticarial vasculitis, adult and juvenile Still's disease, cryropyrinopathy, chronic immune polyneuropathy, autoimmune thyroiditis, idiopathic diabetes, juvenile type 1 diabetes, maturity onset diabetes of the young, latent autoimmune diabetes in adults, gestational diabetes, conditions relating to type 1 diabetes, membranous glomerulonephropathy, autoimmune gastritis, Muckle-Wells syndrome, familial cold-induced auto-inflammatory syndrome, neonatal onset multisystemic inflammatory disease, familial Mediterranean fever, chronic infantile neurologic, cutaneous and articular syndrome, any rheumatic disease, polymyalgia rheumatica, mixed connective tissue disease, inflammatory rheumatism, degenerative rheumatism, extra-articular rheumatism, juvenile arthritis, juvenile rheumatoid arthritis, systemic juvenile idiopathic arthritis, arthritis uratica, muscular rheumatism, chronic polyarthritis, reactive arthritis, Reiter's syndrome, rheumatic fever, relapsing polychondritis, Raynaud's phenomenon, vasculitis, cryoglobulinemic vasculitis, temporal arteritis, giant cell arteritis, Takayasu arteritis, Behcet's disease, chronic inflammatory demyelinating polyneuropathy, autoimmune thyroiditis, insulin dependent diabetes mellitus, type I diabetes, Addison's disease, membranous glomerulonephropathy, polyglandular autoimmune syndromes, Goodpasture's disease, autoimmune gastritis, autoimmune atrophic gastritis, pernicious anaemia, pemphigus, pemphigus vulgaris, cirrhosis, primary biliary cirrhosis, idiopathic pulmonary fibrosis, myositis, dermatomyositis, juvenile dermatomyositis, polymyositis, fibromyositis, myogelosis, celiac disease, celiac sprue dermatitis, immunoglobulin A nephropathy, Henoch-Schonlein purpura, Evans syndrome, atopic dermatitis, psoriasis, psoriasis vulgaris, psoriasis arthropathica, Graves' disease, Graves' ophthalmopathy, scleroderma, systemic scleroderma, progressive systemic scleroderma, diffuse scleroderma, localized scleroderma, Crest syndrome, asthma, allergic asthma, allergy, primary biliary cirrhosis, fibromyalgia, chronic fatigue and immune dysfunction syndrome (CFIDS), autoimmune inner ear disease, Hyper IgD syndrome, Schnitzler's syndrome, autoimmune retinopathy, age-related macular degeneration, atherosclerosis, chronic prostatitis, alopecia, alopecia areata, alopecia universalis, alopecia totalis, autoimmune thrombocytopenic purpura, idiopathic thrombocytopenic purpura, pure red cell aplasia, and TNF receptor-associated periodic syndrome (TRAPS).

[0289] Of particular interest in some embodiments is the treatment of rheumatoid arthritis, lupus, inflammatory bowel disease, psoriasis, multiple sclerosis and diabetes type I.

[0290] As described herein, PVRIG polypeptides which modulate immunity may optionally be used to treat or detect “immune related diseases (or disorders or conditions)”. These phrases or terms are used interchangeably and encompass any disease, disorder or condition selected from the group including but not limited to autoimmune diseases, inflammatory disorders, allergic disorders, e.g., chronic allergic disorders such as asthma, and immune disorders associated with graft transplantation rejection, such as acute and chronic rejection of organ or tissue transplantation, allogenic stem cell transplantation, autologous stem cell transplantation, bone marrow transplantation, and graft versus host disease.

[0291] As further noted, the present PVRIG polypeptides which modulate immunity may be used to treat “inflammatory disorders” and/or “inflammation”. These phrases or terms are used interchangeably herein and include e.g., inflammatory abnormalities characterized by dysregulated immune response to harmful stimuli, such as pathogens, damaged cells, or irritants. Inflammatory disorders underlie a vast variety of human diseases. Non-immune diseases with etiological origins in inflammatory processes include but are not limited to cancer, atherosclerosis, and ischemic heart disease. Examples of disorders associated with inflammation include but are not limited to: Chronic prostatitis, Glomerulonephritis, Hypersensitivities, Pelvic inflammatory disease, Reperfusion injury, Sarcoidosis, Vasculitis, Interstitial cystitis, normocomplementemic urticarial vasculitis, pericarditis, myositis, anti-synthetase syndrome, scleritis, macrophage activation syndrome, Behçet's Syndrome, PAPA Syndrome, Blau's Syndrome, gout, adult and juvenile Still's disease, cryropyrinopathy, Muckle-Wells syndrome, familial cold-induced auto-inflammatory syndrome, neonatal onset multisystemic inflammatory disease, familial Mediterranean fever, chronic infantile neurologic, cutaneous and articular syndrome, systemic juvenile idiopathic arthritis, Hyper IgD syndrome, Schnitzler's syndrome, TNF receptor-associated periodic syndrome (TRAPSP), gingivitis, periodontitis, hepatitis, cirrhosis, pancreatitis, myocarditis, vasculitis, gastritis, gout, gouty arthritis, and inflammatory skin disorders, selected from the group consisting of psoriasis, atopic dermatitis, eczema, rosacea, urticaria, and acne.

[0292] According to at least some embodiments, any one of the foregoing therapeutic agents according to the present invention can be used for adoptive immunotherapy. Immune tolerance or immunological tolerance or prolonged immunosuppression is the process by which the immune system does not attack an antigen. It can be either ‘natural’ or ‘self-tolerance’, where the body does not mount an immune response to self-antigens, or ‘induced tolerance’, where tolerance to external antigens can be created by manipulating the immune system. It occurs in three forms: central tolerance, peripheral tolerance and acquired tolerance. Without wishing to be bound by a single theory, tolerance employs regulatory immune cells—including Tregs—or potentially other immunosuppressive cells such as MDSCs, iMSCs, monocytes, neutrophils, macrophages, that directly suppress autoreactive cells, as well as several other immune cell subsets with immunoregulatory properties—including CD8⁺ T cells and other types of CD4⁺ T cells (Tr1, Th3), Th17 cells, in addition to natural killer (NK), NKT cells, dendritic cells (DC) and B cells.

[0293] Tolerance or prolonged immunosuppression can be induced by blocking costimulation or upon engagement of a co-inhibitory B7 with its counter receptor. Transfer of tolerance involves isolation of the cells that have been induced for tolerance either in vivo (i. e. prior to cell isolation) or ex-vivo, enrichment and expansion of these cells ex vivo, followed by reinfusion of the expanded cells to the patient. This method can be used for treatment of autoimmune diseases as recited herein, immune related diseases as recited herein, transplantation and graft rejection. Thus, according to at least some embodiments, the invention optionally provides methods for tolerance induction, comprising in vivo or ex vivo treatment administration of effective amount of any one of isolated soluble PVRIG polypeptide, or a polypeptide comprising the extracellular domain of PVRIG, or fragment thereof, or a fusion thereof to a heterologous sequence, to a patient or to leukocytes isolated from the patient, in order to induce differentiation of tolerogenic regulatory cells, followed by ex-vivo enrichment and expansion of said cells and reinfusion of the tolerogenic regulatory cells to said patient.

[0294] 1. Treating by Inhibiting the Interaction of PVRIG and PVRL2

[0295] In some embodiments, the invention provides methods of treating subjects by inhibiting the interaction of PVRIG and PVRL2, its associated ligand, as outlined in the examples. As both PVRIG and PVLR2 contain transmembrane domain, the inhibition can be done by preventing the binding of the two, such as by using anti-PVRIG antibodies. Alternately, by administering a soluble PVRIG polypeptide, that will interact with the transmembrane PVLR2 ligand, preventing it from binding to the membrane bound endogenous PVRIG, thus preventing signaling (either by the loss of signaling due to the lack of PVRIG signaling, or by the prevention of free PVLR2 binding to other of its signaling partners, such as DNAM1).

[0296] In some embodiments, the invention provides methods of treating patients by modulating the interaction of PVRIG and PVRL2 by administering a PVRIG polypeptide as outlined herein.

[0297] In some embodiments, the invention provides methods of treating patients by inhibiting the Interaction of PVRIG and PVRL2 by inhibiting the binding of PVRIG to PVLR2 by administering an anti-PVRIG antibody.

[0298] According to at least some embodiments, PVRIG therapeutic agents and/or a pharmaceutical composition comprising same, as described herein, which function as PVRIG agonizing therapeutic agents, may optionally be used for treating an immune system related disease. In some instances the immune system related condition comprises an immune related condition, including but not limited to autoimmune, inflammatory or allergic diseases such as recited herein, transplant rejection and graft versus host disease.

[0299] In some instances the immune condition is selected from autoimmune disease, inflammatory disease, allergic disease, transplant rejection, undesired gene or cell therapy immune responses, or graft versus host disease.

[0300] In some embodiments the treatment is combined with another moiety useful for treating immune related condition. Non limiting examples thereof include immunosuppressants such as corticosteroids, cyclosporin, cyclophosphamide, prednisone, azathioprine, methotrexate, rapamycin, tacrolimus, leflunomide or an analog thereof; mizoribine; mycophenolic acid; mycophenolate mofetil; 15-deoxyspergualine or an analog thereof; biological agents such as TNF-α blockers or antagonists, or any other biological agent targeting any inflammatory cytokine, nonsteroidal antiinflammatory drugs/Cox-2 inhibitors, hydroxychloroquine, sulphasalazopryine, gold salts, etanercept, infliximab, mycophenolate mofetil, basiliximab, atacicept, rituximab, cytoxan, interferon β-1a, interferon β-1b, glatiramer acetate, mitoxantrone hydrochloride, anakinra and/or other biologics and/or intravenous immunoglobulin (IVIG), interferons such as IFN-β1a (REBIF®. AVONEX® and CINNOVEX®) and IFN-β1b (BETASERON®); EXTAVIA®, BETAFERON®, ZIFERON®); glatiramer acetate (COPAXONE®), a polypeptide; natalizumab (TYSABRI®), mitoxantrone (NOVANTRONE®), a cytotoxic agent, a calcineurin inhibitor, e.g. Cyclosporin A or FK506; an immunosuppressive macrolide, e.g. Rapamycin or a derivative thereof; e.g. 40-O-(2-hydroxy)ethyl-rapamycin, a lymphocyte homing agent, e.g. FTY720 or an analog thereof, corticosteroids; cyclophosphamide; azathioprene; methotrexate; leflunomide or an analog thereof; mizoribine; mycophenolic acid; mycophenolate mofetil; 15-deoxyspergualine or an analog thereof; immunosuppressive monoclonal antibodies, e.g., monoclonal antibodies to leukocyte receptors, e.g., MHC, CD2, CD3, CD4, CD11a/CD18, CD7, CD25, CD27, B7, CD40, CD45, CD58, CD137, ICOS, CD150 (SLAM), OX40, 4-1BB or their ligands; or other immunomodulatory compounds, e.g. CTLA4-Ig (abatacept, ORENCIA®, belatacept), CD28-Ig, B7-H4-Ig, or other costimulatory agents, or adhesion molecule inhibitors, e.g. mAbs or low molecular weight inhibitors including LFA-1 antagonists, Selectin antagonists and VLA-4 antagonists, or another immunomodulatory agent.

[0301] In particular, treatment of multiple sclerosis using PVRIG immunoinhibitory proteins according to the invention may e.g., be combined with, any therapeutic agent or method suitable for treating multiple sclerosis. Non-limiting examples of such known therapeutic agent or method for treating multiple sclerosis include interferon class, IFN-β-1a (REBIF®. AVONEX® and CINNOVEX®) and IFN-β-1b (BETASERON®, EXTAVIA®, BETAFERON®, ZIFERON®); glatiramer acetate (COPAXONE®), a polypeptide; natalizumab (TYSABRI®); and mitoxantrone (NOVANTRONE®), a cytotoxic agent, Fampridine (AMPYRA®). Other drugs include corticosteroids, methotrexate, cyclophosphamide, azathioprine, and intravenous immunoglobulin (IVIG), inosine, Ocrelizumab (R1594), Mylinax (Caldribine®), alemtuzumab (Campath®), daclizumab (Zenapax®), Panaclar/dimethyl fumarate (BG-12), Teriflunomide (HMR1726), fingolimod (FTY720), laquinimod (ABR216062), as well as Hematopoietic stem cell transplantation, NeuroVax®, Rituximab (Rituxan®) BCG vaccine, low dose naltrexone, helminthic therapy, angioplasty, venous stents, and alternative therapy, such as vitamin D, polyunsaturated fats, medical marijuana.

[0302] Similarly, treatment of rheumatoid arthritis, using PVRIG immunoinhibitory proteins according to the invention may be combined with, for example, any therapeutic agent or method suitable for treating rheumatoid arthritis. Non-limiting examples of such known therapeutic agents or methods for treating rheumatoid arthritis include glucocorticoids, nonsteroidal anti-inflammatory drug (NSAID) such as salicylates, or cyclooxygenase-2 inhibitors, ibuprofen and naproxen, diclofenac, indomethacin, etodolac Disease-modifying antirheumatic drugs (DMARDs)—Oral DMARDs: Auranofin (Ridaura®), Azathioprine (Imuran®), Cyclosporine (Sandimmune®, Gengraf, Neoral, generic), D-Penicillamine (Cuprimine), Hydroxychloroquine (Plaquenil®), IM gold Gold sodium thiomalate (Myochrysine®) Aurothioglucose (Solganal®), Leflunomide (Arava®), Methotrexate (Rheumatrex®), Minocycline (Minocin®), Staphylococcal protein A immunoadsorption (Prosorba column), Sulfasalazine (Azulfidine®). Biologic DMARDs: TNF-α blockers including Adalimumab (Humira®) Etanercept (Enbrel®), Infliximab (Remicade®), golimumab (Simponi®), certolizumab pegol (Cimzia®), and other biological DMARDs, such as Anakinra (Kineret®), Rituximab (Rituxan®), Tocilizumab (Actemra®), CD28 inhibitor including Abatacept (Orencia®) and Belatacept.

[0303] Thus, treatment of IBD, using the agents according to at least some embodiments of the present invention may be combined with, for example, any known therapeutic agent or method for treating IBD. Non-limiting examples of such known therapeutic agents or methods for treating IBD include immunosuppression to control the symptom, such as prednisone, Mesalazine (including Asacol®, Pentasa®, Lialda®, Aspiro®, azathioprine (Imuran®), methotrexate, or 6-mercaptopurine, steroids, Ondansetron®, TNF-α blockers (including infliximab, adalimumab golimumab, certolizumab pegol), Orencia® (abatacept), ustekinumab (Stelara®), Briakinumab (ABT-874), Certolizumab pegol (Cimzia®), ITF2357 (Givinostat®), Natalizumab (Tysabri®), Firategrast® (SB-683699), Remicade® (infliximab), vedolizumab (MLN0002), other drugs including GSK1605786 CCX282-B (Traficet-EN®), AJM300, Stelara® (ustekinumab), Semapimod® (CNI-1493) tasocitinib (CP-690550), LMW Heparin MMX, Budesonide MMX, Simponi® (golimumab), MultiStem®, Gardasil® HPV vaccine, Epaxal® (virosomal hepatitis A vaccine), surgery, such as bowel resection, strictureplasty or a temporary or permanent colostomy or ileostomy; antifungal drugs such as nystatin (a broad spectrum gut antifungal) and either itraconazole (Sporanox) or fluconazole (Diflucan); alternative medicine, prebiotics and probiotics, cannabis, Helminthic therapy or ova of the Trichuris suis helminth.

[0304] Thus, treatment of psoriasis, using the agents according to at least some embodiments of the present invention may be combined with, for example, any known therapeutic agent or method for treating psoriasis. Non-limiting examples of such known therapeutics for treating psoriasis include topical agents, typically used for mild disease, phototherapy for moderate disease, and systemic agents for severe disease. Non-limiting examples of topical agents: bath solutions and moisturizers, mineral oil, and petroleum jelly; ointment and creams containing coal tar, dithranol (anthralin), corticosteroids like desoximetasone (Topicort), Betamethasone, fluocinonide, vitamin D3 analogues (for example, calcipotriol), and retinoids. Non-limiting examples of phototherapy: sunlight; wavelengths of 311-313 nm, psoralen and ultraviolet A phototherapy (PUVA). Non-limiting examples of systemic agents: biologics, such as interleukin antagonists, TNF-α blockers including antibodies such as infliximab (Remicade®), adalimumab (Humira®), golimumab, certolizumab pegol, and recombinant TNF-α decoy receptor, etanercept (Enbrel®); drugs that target T cells, such as efalizumab (Xannelim®/Raptiva®), alefacept (Ameviv®), dendritic cells such Efalizumab; monoclonal antibodies (MAbs) targeting cytokines, including anti-IL-12/IL-23 (ustekinumab (Stelara®)) and anti-Interleukin-17; Briakinumab® (ABT-874); small molecules, including but not limited to ISA247; immunosuppressants, such as methotrexate, cyclosporine; vitamin A and retinoids (synthetic forms of vitamin A); and alternative therapy, such as changes in diet and lifestyle, fasting periods, low energy diets and vegetarian diets, diets supplemented with fish oil rich in vitamin A and vitamin D (such as cod liver oil), fish oils rich in the two omega-3 fatty acids eicosapentaenoic acid (EPA) and docosahexaenoic acid (DHA) and contain vitamin E, ichthyotherapy, hypnotherapy, and cannabis.

[0305] Thus, treatment of type 1 diabetes, using the agents according to at least some embodiments of the present invention may be combined with, for example, any known therapeutic agent or method for treating type 1 diabetes. Non-limiting examples of such known therapeutics for treating type 1 diabetes include insulin, insulin analogs, islet transplantation, stem cell therapy including PROCHYMAL®, non-insulin therapies such as i1-1β inhibitors including Anakinra (Kineret®), Abatacept (Orencia®), Diamyd, alefacept (Ameviv®), Otelixizumab, DiaPep277 (Hsp60 derived peptide), α1-Antitrypsin, Prednisone, azathioprine, and Cyclosporin, E1-INT (an injectable islet neogenesis therapy comprising an epidermal growth factor analog and a gastrin analog), statins including Zocor®, Simlup®, Simcard®, Simvacor®, and Sitagliptin® (dipeptidyl peptidase (DPP-4) inhibitor), anti-CD3 mAb (e.g., Teplizumab®); CTLA4-Ig (abatacept), anti-IL-1β (Canakinumab), Anti-CD20 mAb (e. g, rituximab) and combinations thereof

[0306] Thus, treatment of uveitis, using the agents according to at least some embodiments of the present invention may be combined with, for example, any known therapeutic agent or method for treating uveitis. Non-limiting examples of such known therapeutics for treating uveitis include corticosteroids, topical cycloplegics, such as atropine or homatropine, or injection of PSTTA (posterior subtenon triamcinolone acetate), antimetabolite medications, such as methotrexate, TNF-α blockers (including infliximab, adalimumab, etanercept, golimumab, and certolizumab pegol).

[0307] Thus, treatment for Sjógren's syndrome, using the agents according to at least some embodiments of the present invention may be combined with, for example, any known therapeutic agent or method for treating for Sjógren's syndrome. Non-limiting examples of such known therapeutics for treating for Sjógren's syndrome include Cyclosporine, pilocarpine (Salagen®) and cevimeline (Evoxac®), Hydroxychloroquine (Plaquenil), cortisone (prednisone and others) and/or azathioprine (Imuran®) or cyclophosphamide (Cytoxan®), Dexamethasone, Thalidomide, Dehydroepiandrosterone, NGX267, Rebamipide®, FID 114657, Etanercept®, Raptiva®, Belimumab, MabThera® (rituximab); Anakinra®, intravenous immune globulin (IVIG), Allogeneic Mesenchymal Stem Cells (AlloMSC®), and Automatic neuro-electrostimulation by “Saliwell Crown”.

[0308] Thus, treatment for systemic lupus erythematosus, using the agents according to at least some embodiments of the present invention may be combined with, for example, any known therapeutic agent or method for treating for systemic lupus erythematosus. Non-limiting examples of such known therapeutics for treating for systemic lupus erythematosus include corticosteroids and Disease-modifying antirheumatic drugs (DMARDs), commonly anti-malarial drugs such as plaquenil and immunosuppressants (e.g. methotrexate and azathioprine) Hydroxychloroquine, cytotoxic drugs (e.g., cyclophosphamide and mycophenolate), Hydroxychloroquine (HCQ), Benlysta® (belimumab), nonsteroidal anti-inflammatory drugs, Prednisone, Cellcept®, Prograf®, Atacicept®, Lupuzor®, Intravenous Immunoglobulins (IVIGs), CellCept® (mycophenolate mofetil), Orencia®, CTLA4-IgG4m (RG2077), rituximab, Ocrelizumab, Epratuzumab, CNTO 136, Sifalimumab (MEDI-545), A-623 (formerly AMG 623), AMG 557, Rontalizumab, paquinimod (ABR-215757), LY2127399, CEP-33457, Dehydroepiandrosterone, Levothyroxine, abetimus sodium (LJP 394), Memantine®, Opiates, Rapamycin®, renal transplantation, stem cell transplantation and combinations of any of the foregoing.

[0309] The immunoinhibitory PVRIG therapeutic agents and/or a pharmaceutical composition comprising same, as recited herein, according to at least some embodiments of the invention, may be administered as the sole active ingredient or together with other drugs in immunomodulating regimens or other anti-inflammatory agents e.g. for the treatment or prevention of allo- or xenograft acute or chronic rejection or inflammatory or autoimmune disorders, or to induce tolerance.

### EXAMPLES

[0310] Specifically incorporated by reference herein is U.S. Ser. No. 62/141,168, filed 31 Mar. 2015, and U.S. Ser. No. 62/118,235, filed 19 Feb. 2015, in their entirety, and in particular for the Examples therein, and for the associated Figures and Legends.

### Example 1: Expression Analysis of PVRIG Proteins

[0311] Specifically incorporated by reference herein is U.S. Ser. No. 62/141,168, filed 31 Mar. 2015, and U.S. Ser. No. 62/118,235, filed 19 Feb. 2015, in their entirety, and in particular for the Examples therein, and for the associated Figures and Legends.

### Example 1A

[0312] The GDS3113 data set (http://www.ncbi.nlm.nih.gov/sites/GDSbrowser?acc=GDS3113) was analyzed to identify genes with a lymphoid organ specific pattern. PVRIG was identified as lymphocyte specific due to high expression in primary and secondary lymphoid organs, which include peripheral blood, bone marrow, spleen, lymph nodes, tonsil and thymus (FIG. 2). Other tissue types were negative or showed expression at background levels. In order to investigate which specific cell types within the total population of immune cells express PVRIG, additional data sets form the Gene Expression Omnibus (www.ncbi.nlm.nih.gov/GEO) were analyzed, as described in “methodology” section herein. The analysis was performed on immune cell populations derived from peripheral blood and bone marrow. PVRIG was expressed in lymphocytes both in the B-cell linage and the T-cell linage including CD8 T-cells naïve, effector and memory (FIG. 3). In addition, PVRIG was expressed in NK cells and had the highest expression in the iNKT population (FIG. 4). The iNKT population of lymphocytes act as potent activators of antitumor immunity when stimulated with a synthetic agonist in experimental models. However, in some settings, iNKT cells can act as suppressors and regulators of antitumor immunity (Clin Dev Immunol. 2012; 2012:720803). Furthermore, in early clinical trials of iNKT cell-based immunotherapy demonstrated that the infusion of ligand-pulsed antigen presenting cells treatment of and/or in vitro activated iNKT cells were safe and well tolerated in lung cancer and head and neck cancer (Clin Immunol. 2011 August; 140(2): 167-76.).

[0313] A key question in regards to PVRIG expression was whether Tumor Infiltrating Lymphocytes (TILs) retain expression of PVRIG in the tumor microenvironment. Analyzing expression data of TILs form follicular lymphoma, breast cancer and colon cancer showed clear expression of PVRIG in the TILs infiltrating the tumor. In the colon cancer example the specificity to the immune infiltrating cells was seen as the expression is found only in the CD45 positive population (leukocyte specific marker), and no expression is found in EPCAM positive population (epithelial specific marker) or in the CD45 negative EPCAM negative (stromal cell population). Although the CD45 is not a lymphocyte specific marker, the other expression description infers that it is expressed on the lymphocyte population (FIG. 5A colon cancer, FIG. 5B breast cancer and FIG. 5C follicular lymphoma).

[0314] The mRNA expression data shown herein indicates that PVRIG is expressed in lymphocytes and in tumor infiltrating lymphocytes (TILs). These results together with PVRIG inhibitory activity propose an inhibitory role of the molecule in T-cells, suggesting that inhibitory antibodies to PVRIG elevates PVRIG's suppressive role on the TILs and thus enable the TILs to induce an immune response against cancer. As the proposed mechanism of action is directed to the TILs infiltrating the tumor, rather than direct effect on the tumor cells, any cancer with immune infiltration is candidate for treatment using PVRIG inhibitory antibodies.

[0315] Methodology:

[0316] Raw data is downloaded from the GEO site in SOFT format. In cases where the raw data was in MASS format, the data was taken without manipulation. If the data was in Log MASS then the data was converted to linear data. If the data was in RMA format CEL files (raw data) were downloaded and re-analyzed using MASS. If raw CEL files were not available the RMA format was used.

[0317] Data was then normalized by multiplicative according to the 95th percentile for Affy data. Datasets analyzed: GSE49910, GSE47855, GSE39397, GSE36765, GSE27928.

[0318] Specifically incorporated by reference herein is U.S. Ser. No. 62/141,168, filed 31 Mar. 2015, and U.S. Ser. No. 62/118,235, filed 19 Feb. 2015, in their entirety, and in particular for the Examples therein, and for the associated Figures and Legends.

### Example 1B

[0319] A transcriptome reference was generated based on UCSC know genes models (http://hgdownload.cse.ucsc.edu/goldenPath/hg19/database/knownGene.txt.gz). All RNA sequencing reads were aligned to the transcriptome sequences first. This alignment allowed for non-unique mapping because isoforms share many exons. Each read was then assigned genomic coordinates and exon junctions based on the transcriptome matching. The remaining unmapped reads were aligned directly to the genome by considering one or more exon junctions. Finally, read counts were normalized as described by Bo et al. (Bioinformatics 2010, 26 (4): 493-500) and converted to gene expression values as described by Trapnell et al (Nat Biotechnol. 2010 May; 28(5):511-5).

[0320] As shown in FIG. 6, based on Genotype-Tissue Expression (GTEx) data (http://www.nature.com/ng/journal/v45/n6/full/ng.2653.html; http://www.gtexportal.org/home/), PVRIG is expressed mainly in blood cells and to lesser extent in various normal tissues. The same results were observed in cancerous tissues from The Cancer Genome Atlas (TCGA) (http://cancergenome.nih.gov/) in which high expression are seen in blood cancers like B-cell lymphomas and AML (FIG. 7). A gene expression signature was generated for a variety of cancers and normal tissues using GTEx and TCGA data by identifying genes with a highly correlated expression pattern to PVRIG.

[0321] The correlation analysis was conducted per tumor type and only correlations where both genes were expressed above 0 RPKM with at least 50 samples in the same tumor type, were considered. These gene expression signatures were tested for enrichment of interacting proteins, pathways and disease genes. Enrichment p-values were calculated for each tumor type and the mean −log(p-value) was used to rank the scoring gene sets. A clear signature of lymphocytes and T-cells was observed in a variety of cancers, as shown in. For instance, the top scoring gene in protein interaction was IL2, meaning that genes known to interact with IL2 are more correlated with PVRIG than expected by chance across most cancers. Further analysis showed that PVRIG expression in cancer tissues are higher than normal. While in FIG. 5 the median expression level of PVRIG is below 1 across most normal solid tissues, in FIG. 6 it is clearly higher than 1 in many cancers. As an example, when compared side by side in FIG. 7, melanoma PVRIG was expressed higher than normal skin (FIG. 9). We further characterized the source of over-expression in cancer. PVRIG is highly expressed in T cells and is highly correlated to markers of T cells in cancer. In FIG. 10, PVRIG correlation to CD3, CD4 and CD8 are shown as an example in three cancer types, namely, lung adenocarcinoma, colon adenocarcinoma and melanoma. In addition, PVRIG is highly correlated to PD1, a validated target for immunotherapy in cancer known to be expressed on T cells (FIG. 10).

[0322] These gene expression signatures were tested for enrichment of interacting proteins, pathways and disease genes. A clear signature of lymphocytes and T-cells was observed in a variety of cancers, as shown in FIG. 8. We further analyzed the correlation of PVRIG to PD1 and showed high correlation between their expression in various tumors including breast lung pancreas and kidney (Table 2). Both PD-1 and PVRIG are highly expressed on activated T cells. PVRIG showed high correlation with T cell markers in cancer, namely, CD8A, CD4 and CD3G (FIG. 13). Taken together, these data demonstrate that cancer expression of PVRIG is associated with tumor infiltrating lymphocytes.

[0323] Methods:

[0324] Genes correlation: FPKM values were transformed to log 2 (FPKM+0.1). Samples with value that fulfills log 2 (FPKM+0.1)<log 2(0.1) for at least one of the genes, were omitted. Pearson Correlation Coefficient (PCC) and the Least Squared Estimators for the regression line were computed for the 2 lists (one list per gene). PCCs with lower value than 0.5 were omitted as well as PCCs that failed to show significant value when testing the linear correlation between the expression levels of the 2 genes.

[0325] Gene Enrichment analysis: Pathway, interaction and disease data were obtained from GeneGo Metacore (https://portal.genego.com), Reactome (http://www.reactome.org) and KEGG Pathways (http://www.genome.jp/kegg). To identify pathways and processes that were enriched within a given gene list, a hyper-geometric-based enrichment analysis was implemented. The hyper-geometric p-value was calculated using the R program (http://www.R-project.org) with the following command: phyper(x−1, m, n−m, k and lower.tail=FALSE), where x is the number of genes from the gene list that are members of the pathway, m is the number of genes in the pathway, n is the total number of unique genes in all pathways, and k is the number of genes from the list that were present in at least one pathway. The resulting p-value is indicative of the likelihood of enriching for a specific pathway by chance given the size of the gene list. The same analytical procedure was applied to gene interactions where all genes interacting with a given gene were treated as a pathway; or genes associated with a disease where all associated genes were treated as a pathway. See FIGS. 64A and 64B.

[0326] PVRIG expression was associated with exhausted T cells in cancer. Cancer samples from TCGA were chosen that have high (4th quartile) expression of the following 4 markers: CD8, PD-1, TIM-3 and TIGIT. Cancer samples were then divided to high, no change and low levels of the combined expression of the 4 markers. PVRIG was not detected in any of the low expressing markers (low or no exhausted T cells). The vast majority of tumors associated with high levels of exhausted T cells expressed high levels of PVRIG (FIG. 22).

[0327] Specifically incorporated by reference herein is U.S. Ser. No. 62/141,168, filed 31 Mar. 2015, and U.S. Ser. No. 62/118,235, filed 19 Feb. 2015, in their entirety, and in particular for the Examples therein, and for the associated Figures and Legends.

### Example 1C

[0328] The expression of human and non-human primate PVRIG RNA and protein in cell lines and primary leukocytes was evaluated.

### Protocols

[0329] FACS Analysis of Engineered Over-Expressing Cells:

[0330] The following cell lines were used to assess the specificity of anti-human PVRIG antibodies: HEK parental and HEK hPVRIG over-expressing cells. These cells were cultured in DMEM (Gibco)+10% fetal calf serum (Gibco)+glutamax (Gibco). For the HEK hPVRIG over-expressing cells, 0.5 μg/ml puromycin (Gibco) was also added to the media for positive selection. For FACS analysis, all cell lines were harvested in log phase growth and 50,000-100,000 cells per well were seeded in 96 well plates. Anti-human PVRIG antibodies (human IgG1, hIgG1) and their respective controls were added in single point dilutions (5 μg/ml), or as an 8 point titration series starting at 30 μg/ml on ice for 30 mins-1 hr. The titration series were conducted as either 1:3 or 1:3.3 fold serial dilutions. Data was acquired using a FACS Canto II (BD Biosciences) and analyzed using FlowJo (Treestar) and Prism (Graphpad) software.

[0331] FACS Analysis of Human Cell Lines:

[0332] The following cell lines were used to assess the expression and specificity of anti-human PVRIG antibodies: Jurkat, CA46, NK-92, OV-90, HepG2, and NCI-H441. Jurkat, CA46, and NCI-H441 cells were cultured in RPMI media+10% fetal calf serum, glutamax, non-essential amino acids (Gibco), sodium pyruvate (Gibco), and penicillin/streptomycin (Gibco). NK-92 cells were cultured in RPMI media+25% fetal calf serum, glutamax, non-essential amino acids, sodium pyruvate, penicillin/streptomycin, and 500 U/ml IL-2 (R&D systems). OV-90 cells were cultured in a 1:1 mixture of MCDB 105 media (Sigma) containing a final concentration of 1.5 g/L sodium bicarbonate (Life Technologies) and Media 199 (Sigma) containing a final concentration of 2.2 g/L sodium bicarbonate with a final concentration of 15% fetal calf serum. HepG2 cells were cultured in DMEM+10% fetal calf serum+glutamax. For FACS analysis, all cell lines were harvested in log phase growth and 50,000-100,000 cells per well were seeded in 96 well plates. Anti-human PVRIG antibodies (hIgG1) and their respective controls were added in single point dilutions (5 μg/ml), or as an 8 point titration series starting at 30 μg/ml on ice for 30 mins-1 hr. The titration series were conducted as either 1:3 or 1:3.3 fold serial dilutions. Data was acquired using a FACS Canto II and analyzed using FlowJo and Prism software.

[0333] FACS Analysis of Naïve Human Primary Leukocytes:

[0334] Primary leukocytes were obtained by Ficoll (GE Healthcare) gradient isolation of peripheral blood (Stanford Blood Bank). Leukocytes as isolated peripheral blood mononuclear cells (PBMC) were frozen down in liquid nitrogen at a density between 1×107 and 5×107 cells/ml in a 10% DMSO (Sigma), 90% fetal calf serum mixture. To assess protein expression of PVRIG on PBMC, antibody cocktails towards major immune subsets were designed that included human anti-PVRIG antibodies. Anti-human PVRIG antibodies (hIgG1) and their respective controls were added in single point dilutions (5 μg/ml), or in some cases, as an 8 point titration series starting at 10 or 30 μg/ml on ice for 30 mins-1 hr.

[0335] Briefly, antibody cocktail mixtures were added to resuscitated PBMC that were seeded at 5×10⁵-1×10⁶ cells/well upon prior Fc receptor blockade and live/dead staining (Aqua Live/Dead, Life Technologies). Antibody cocktails were incubated with PBMC for 30 mins-1 hr on ice. PBMC were then washed and data was acquired by FACS using a FACS Canto II. Data was analysed using FlowJo and Prism software. Immune subsets that were analysed include CD56 dim NK cells, CD56 bright NK cells, CD4+ T cells, CD8+ T cells, non-conventional T cells (e.g. NKT cells and γδ T cells), B cells, and monocytes.

[0336] FACS Analysis of Activated Human Effector Lymphocytes:

[0337] In some cases, expression of PVRIG was assessed on activated effector lymphocyte subsets either isolated from whole PBMC or in whole PBMC preparations. Effector lymphocytes were stimulated with combinations of cytokines, combinations of antibodies and cytokines, or pathogenic products. FACS analysis of PVRIG expression on activated cells was performed analogous to that described above for naïve primary leukocytes.

[0338] To study PVRIG expression on stimulated NK cells, CD56+ cells were isolated and cultured in various cocktails of cytokines for 1-3 days in NK cell media (RPMI+10% fetal calf serum, glutamax, penicillin/streptomycin, non-essential amino acids, sodium pyruvate, and beta-mercaptoethanol [Gibco]). NK cells were sorted either using anti-human CD56+ microbeads (Miltenyi Biotec) or the human NK cell isolation kit (Miltenyi Biotec) according to the manufacturer's instructions. Cocktails of cytokines used to simulate NK cells included IL-2, IL-12, IL-15, IL-2/IL-12, IL-2/IL-15, IL-12/IL-15 (R&D systems).

[0339] To study PVRIG expression on stimulated T cells, CD4+ or CD8+ T cells were isolated using CD4+ or CD8+ microbeads (Miltenyi Biotec). The isolated cells were cultured for 3 days in the presence of various activating conditions in T cell media (RPMI+10% fetal calf serum, glutamax, penicillin/streptomycin, non-essential amino acids, sodium pyruvate). Conditions used to stimulate isolated T cells include human dynabead stimulation (beads coupled to CD3/CD28 antibodies, Life Technologies) with IL-2 or cytokine cocktails that drive T cells to certain phenotypes (e.g. Th1, Th2, Th17, and T regulatory phenotypes). Th1 driving cytokines are recombinant IL-12 (R&D systems) and an anti-IL-4 neutralizing antibody (Biolegend). Th2 driving conditions are recombinant IL-4 (R&D systems) and an anti-IFN-gamma neutralizing antibody (Biolegend). Th17 driving conditions are recombinant IL-6 (R&D systems), TGF-beta (R&D systems), IL-23 (R&D systems), and anti-IL-4 and anti-IFNγ neutralizing antibodies. T regulatory driving conditions are recombinant TGF-beta and IL-2, and anti-IL-4 and anti-IFNγ neutralizing antibodies.

[0340] Alternatively, activated T cells were also analyzed in whole stimulated PBMC cultures with staphylococcal enterotoxin B (SEB) antigen (List Biological Laboratories) for 3 days, or in a mixed lymphocyte reaction (MLR) where CD4+ T cells are co-cultured with allogeneic dendritic cells for 2 or 5 days.

[0341] FACS Analysis of Human Polarized Monocytes:

[0342] PVRIG expression was assessed on dendritic cells derived from polarized monocytes. In this instance, CD 14+ cells were enriched using RosetteSep human monocyte enrichment according to manufacturer's instructions. After CD14+ cell enrichment, monocytes were polarized to dendritic cells upon culture with GM-CSF (R&D systems) and IL-4 (R&D systems) for 4 days in RPMI+10% fetal calf serum, glutamax, penicillin/streptomycin, non-essential amino acids, sodium pyruvate, and beta-mercaptoethanol.

[0343] RNA Expression Analysis of Human Cell Lines and Leukocytes by qPCR:

[0344] Cell lines that were assessed for RNA expression by qPCR were Jurkat, CA46, Daudi, Raji, and expi 293 cells. Jurkat, CA46, Raji, and Daudi cells were cultured in RPMI media+10% fetal calf serum, glutamax, non-essential amino acids, sodium pyruvate, and penicillin/streptomycin. Expi 293 cells were cultured in DMEM+10% FCS+glutamax. OV-90, HepG2, and NCI-H441 RNA was analysed by a bioinformatics screen of the cancer cell line atlas. For those cell lines that were assessed for RNA expression by qPCR, the cells were harvested in log phase growth and 1,000,000 cells were harvested, washed in PBS, and lysed in 350 ul of RLT buffer (Qiagen). Lysed cells in RLT buffer were stored at −80° C. until use.

[0345] Primary leukocytes that were assessed for RNA expression were CD56+NK cells, CD4+ T cells, CD8+ T cells, and CD14+ monocytes. Cell populations were isolated using human CD56+, CD4+, CD8+, and CD14+ positive selection kits according to manufacturer's instructions (Miltenyi Biotec). After sorting, cells were lysed in 350 ul of RLT buffer and stored at −80° C. until use. In some instances, activated PBMC subsets (activation conditions outlined above) were harvested from culture and were lysed in 350 ul of RLT buffer and stored at −80° C. until use.

[0346] Upon day of use, RNA was generated from lysed cells using the Qiagen mini kit according to the manufacturer's instructions. cDNA was generated using Applied Biosystems high capacity cDNA reverse transcription kit. qPCR using cDNA was performed using Taqman primers (ThermoFisher) and Applied Biosystems Taqman fast advanced mastermix. The PVRIG primer set used was Taqman catalogue number: Hs04189293_g1. Beta-actin housekeeping primer set used was Taqman catalogue number: Hs01060665_g1. Expression of transcript was assessed by quantifying Ct values and relative expression was calculated by the 2^{(-ΔΔCt)} method. Data was acquired on an Applied Biosystems Step One Plus instrument.

[0347] FACS Analysis of Cynomolgus PVRIG Engineered Over-Expressing Cells:

[0348] The following cell lines were used to assess the cross-reactivity of anti-human PVRIG antibodies with cynomolgus PVRIG (cPVRIG): expi parental and expi cPVRIG over-expressing cells. These cells were cultured in DMEM+10% fetal calf serum+glutamax. expi cPVRIG transient over-expressing cells were generated by electroporating cPVRIG DNA into parental expi cells using the Neon transfection system. For FACS analysis, expi cPVRIG cells were used between 1-3 days post transfection. Parental expi cells were harvested from log growth phase. 50,000-100,000 cells of per well of each type were seeded in 96 well plates. Anti-human PVRIG antibodies (hIgG1) and their respective controls were added in single point dilutions (5 μg/ml), or as an 8 point titration series starting at 100 μg/ml on ice for 30 mins-1 hr. The titration series were conducted as either 1:3 or 1:3.3 fold serial dilutions. Data was acquired using a FACS Canto II and analyzed using FlowJo and Prism software.

[0349] FACS Analysis of Naïve Primary Cynomolgus Monkey Leukocytes:

[0350] Primary cynomolgus monkey (cyno) leukocytes were obtained from fresh blood which was drawn no longer than 24 hours prior to expression analysis. Blood was sourced from Bioreclamation. To assess protein expression of PVRIG on cyno PBMC, antibody cocktails towards major immune subsets were designed that included human anti-PVRIG antibodies. Anti-human PVRIG antibodies (hIgG1) and their respective controls were added in single point dilutions (5 μg/ml).

[0351] Briefly, antibody cocktail mixtures were added to PBMC that were seeded at 5×10⁵-1×10⁶ cells/well upon prior Fc receptor blockade and live/dead staining. Antibody cocktails were incubated with PBMC for 30 mins-1 hr on ice. PBMC were then washed and data was acquired by FACS using a FACS Canto II. Data was analysed using Prism software. Immune subsets that were analysed include CD16+ lymphocytes, CD14+/CD56+ monocytes/myeloid cells, and CD3+ T cells.

[0352] RNA Expression Analysis of Primary Cynomolgus Monkey Leukocytes:

[0353] Primary leukocytes that were assessed for RNA expression were CD56+, CD16+, and CD56−/CD16− subsets. Cell populations were isolated using non-human primate CD56 and CD16 positive selection kits according to manufacturer's instructions (Miltenyi Biotec). After sorting, cells were lysed in 350 ul of RLT buffer and stored at −80° C. until use.

[0354] Upon day of use, RNA was generated from lysed cells using the Qiagen mini kit according to the manufacturer's instructions. cDNA was generated using Applied Biosystems high capacity cDNA reverse transcription kit. qPCR using cDNA was performed using Taqman primers and Applied Biosystems Taqman fast advanced mastermix. Two sets of primers to detect cyno PVRIG were designed by Compugen USA, Inc and manufactured by Genscript. The sequence and primer codes are:

Primer set 1
(SEQ ID NO: 1543)
Forward: CTTGTGTTCACCACCTCTGG
(SEQ ID NO: 1544)
Reverse: TGTTCTCATCGCAGGAGGTC
Primer set 2
(SEQ ID NO: 1545)
Forward: TTGGCTGTGGATACCTCCTT
(SEQ ID NO: 1546)
Reverse: ATAAGGGTCGTGGAGAGCAG

[0355] Beta-actin primers were used for housekeeping and the primer set used was Taqman catalogue number: Mf04354341_g1. Expression of transcripts was assessed by quantifying Ct values and relative expression was calculated by the 2^{(-ΔΔCt)} method. Products generated with PVRIG primers and beta-actin primers were also size analysed by traditional RT-PCR using a 2.5% agarose gel. qPCR data was acquired using an Applied Biosystems Step One Plus instrument.

### Results

[0356] PVRIG Antibodies Recognize PVRIG on Overexpressing Cells:

[0357] To screen for antibodies that were specific for PVRIG, we assessed the ability of antibodies that were generated from a phage campaign to bind HEK cell lines that were engineered to overexpress PVRIG. The majority of antibodies from this campaign upon reformatting to human IgG1 bound to the HEK hPVRIG cells, albeit with varying affinity. Furthermore, the majority of these antibodies also showed low background binding to HEK parental cell lines indicating high specificity towards PVRIG. FIG. 27 shows one example of the specificity of PVRIG antibodies. A summary of all binding characteristics of the antibodies towards HEK hPVRIG cells relative to control that were generated in this phage campaign are displayed in FIGS. 31A-31B.

[0358] Human PVRIG RNA is Expressed in a Range of Cancer Cell Lines:

[0359] To initially screen for cell lines that could be used to assess PVRIG protein expression by antibodies, we examined the cancer cell line atlas for cell lines that were high for PVRIG RNA as assessed by bioinformatics. We found four cell lines that were readily accessible commercially that were high expressors for PVRIG RNA that we chose to validate by qPCR analysis. These cell lines were Jurkat, CA46, Raji, and Daudi.

[0360] When qPCR analysis was conducted, we detected PVRIG RNA in all four cell lines consistent with the bioinformatics analysis (FIG. 28). As a negative control we included expi cells that had relatively low PVRIG RNA expression.

[0361] Human PVRIG RNA is Expressed in T Cells and NK Cells:

[0362] To initially screen PBMC for subsets likely to be positive for PVRIG protein as detected by our antibodies, we sorted major PBMC subsets and examined PVRIG RNA expression by qPCR. Levels of PVRIG RNA in CD56+ NK cells, CD4+ T cells, CD8+ T cells, and CD14+ monocytes were compared to those in Jurkat, HEK parental, and HEK hPVRIG cell lines. As shown in FIG. 29, PVRIG RNA was detected most highly and up to 50 fold higher in CD4+ T cells, CD8+ T cells, and CD56+ NK cells when normalized to HEK GFP cells. Similar to FIG. 28, Jurkat cells also showed positive expression. In contrast, CD14+ monocytes did not show higher PVRIG expression relative to HEK GFP cells indicating very low PVRIG RNA expression.

[0363] In addition to analyzing naïve PBMC, select populations (effector lymphocytes) were also activated under various stimulatory conditions and expression of PVRIG RNA was assessed. More specifically, NK cells were activated with various combinations of stimulatory cytokines, whereas T cells were polyclonally activated with human activator dynabeads or staphylococcus enterotoxin B (SEB) with or without polarizing cytokines (see protocol section for details). As shown in FIG. 30A and B, PVRIG RNA expression generally increased in both NK cells and T cells upon various stimulation conditions, the extent of which depended on the individual donor. More specifically, FIG. 30a shows PVRIG RNA expression in naïve and activated CD4 T cells and NK cells. FIG. 30b shows PVRIG RNA expression in naïve and activated CD8 T cells.

[0364] PVRIG Antibodies Recognize PVRIG Protein on NK Cells Most Prominently in Naïve and Activated Primary Immune Subsets:

[0365] Upon confirming the RNA expression pattern of PVRIG RNA expression in naïve and activated PBMC subsets, we used our panel of PVRIG antibodies to assess protein expression. We first assessed PVRIG expression in naïve PBMC subsets. The population which displayed the highest level of PVRIG was NK cells. CD4+ and CD8+ T cells showed low levels of PVRIG, while B cells and monocytes had no detectable expression. A summary of expression on NK cells and CD8+ T cells as detected by our antibodies is shown in FIGS. 32A and 32B. Other minor subsets also displayed PVRIG expression and included non-conventional T cells such as NKT cells and γδ T cells. The expression pattern on PBMC subsets was very similar across all donors we sourced and analyzed.

[0366] When PVRIG protein was assessed after various stimulation conditions (including polyclonal simulation, cytokine stimulation, and MLR), there was no robust up-regulation of PVRIG on any PBMC subsets, including NK cells and CD4+ and CD8+ T cells. Furthermore, monocytes which were polarized in vitro to dendritic cells with GM-CSF and IL-4 did not show detectable PVRIG expression consistent with that seen on non-polarized monocytes.

[0367] PVRIG is Detected on Cell Lines by a Proportion of PVRIG Antibodies:

[0368] In addition to screening PBMC for PVRIG protein expression, we wanted to understand whether it was also expressed on cancer cell lines. Using the positive cell lines identified by RNA expression (FIG. 28), we chose to screen our antibodies on Jurkat and CA46 cells as they showed the lowest absolute Ct values relative to our housekeeping gene. We also chose a range of negative cell lines to further validate the specificity of our antibodies which included OV-90, NCI-H441, and HepG2. A proportion of our antibodies did detect PVRIG protein expression on Jurkat and CA46 cells (FIGS. 31A and 31B), but not the negative cell lines. An example of PVRIG detection on Jurkat and CA46 is shown in FIG. 33 with a representative antibody, CPA.7.021. The expression on Jurkat and CA46 was completely in accordance with each other and the intensity of expression was similar across the two cell lines.

[0369] PVRIG Antibodies Detect Cynomolgus PVRIG Transiently Expressed on Expi Cells:

[0370] In order to assess the pre-clinical suitability of our anti-human PVRIG antibodies for pharmacological studies in cynomolgus monkey, we wanted to understand whether our antibodies were able to cross-react with cynomolgus PVRIG (cPVRIG). A proportion of our antibodies were able to detect cPVRIG which was transiently transfected onto expi cells (FIG. 29). An example of an antibody that yielded negative staining (CPA.7.021) and one that yielded positive staining (CPA.7.024) are shown in FIGS. 34A-34D.

[0371] PVRIG RNA is Detected in Cynomolgus PBMC:

[0372] Prior to assessment of PVRIG protein on cyno PBMC, we firstly wanted to determine the PVRIG RNA expression profile in cyno PBMC subsets. As no cPVRIG primers set existed, we designed two sets that were directed at two distinct sites on the cPVRIG gene. One primer set was specific for the X2 variant of cPVRIG, while the other set was able to pick up both the X1 and X2 variant. As shown in FIG. 35, both primer sets were able to detect cPVRIG RNA at a similar level when compared to each other. Furthermore, unlike human PBMC where there was a distinct PVRIG RNA signature in effector lymphocytes (NK and T cells) compared to monocytes, cPVRIG RNA was expressed at a similar level across all PBMC subsets from all donors assessed.

[0373] PVRIG Protein Expression on Cynomolgus PBMC is Very Low or Negative:

[0374] Having established a cPVRIG RNA profile for cyno PBMC, we screened for the presence of cPVRIG protein on cyno PBMC using a select panel of anti-human PVRIG antibodies. The antibodies chosen to screen PBMC were based on their ability to bind cPVRIG transient cells and/or functional activity. As shown in FIGS. 36A-36C, we were able to detect low level of expression of cPVRIG on the CD16+ lymphocyte subset (NK cells) from a range of antibodies, but not the CD3+ lymphocyte subset (T cells) nor the CD14+ CD56+ myeloid subset (monocytes). Despite this data, those antibodies that showed positive detection over control (as denoted by the solid black line) did not correlate to those that were able to bind the cPVRIG transient cells. For example, the level of staining by CPA.7.021 was more than CPA.7.024 despite the former not binding to cPVRIG transient cells (see FIGS. 36A-36C).

[0375] Summary and Conclusions:

[0376] Using an antibody phage platform, we have been able to successfully generate monoclonal antibodies towards the human PVRIG antigen. Using engineered over-expressing cells as well as a suite of cancer cell lines, we showed that our antibodies are highly specific to the PVRIG antigen, and are able to detect protein expression which correlated with RNA expression. Upon analysis of human PBMC subsets, we showed that the PVRIG protein is most highly expressed on NK cells, with low expression on conventional CD3+ T cells, and not detectable on B cells and myeloid cells. The expression did not robustly change upon exposing these cell types to various stimulation conditions. We also showed that a panel of our antibodies are cross-reactive with the cynomolgus monkey (cyno) PVRIG antigen through assessing their binding to over-expressing cells. However, the combination of the low level of binding of this panel of antibodies to cyno PBMC, the lack of protein correlation with RNA, and the discordance of their ability to bind to over-expressing cells (compared to PBMC) indicates that the PVRIG antigen on cyno PBMC may be very low/negative, or it is expressed in a different/more complex form compared to the over-expressing cells.

[0377] Specifically incorporated by reference herein is U.S. Ser. No. 62/141,168, filed 31 Mar. 2015, and U.S. Ser. No. 62/118,235, filed 19 Feb. 2015, in their entirety, and in particular for the Examples therein, and for the associated Figures and Legends.

### Example 1D

### Expression of PVRIG in PBMC Subsets from Healthy Donors

[0378] The expression of PVRIG in PBMC subsets from healthy donors was tested (gating strategy is shown in FIG. 1a). In the tested samples, PVRIG was shown to express on CD8+ T cells (data not shown), CD8α+ γδ T cell (data not shown), double-negative γδ T cells (data not shown) and to a milder extent also on CD4+ T cells (data not shown) of healthy donors PBMCs (n=5).

[0379] Specifically incorporated by reference herein is U.S. Ser. No. 62/141,168, filed 31 Mar. 2015, and U.S. Ser. No. 62/118,235, filed 19 Feb. 2015, in their entirety, and in particular for the Examples therein, and for the associated Figures and Legends.

### Example 1E

### Co-Expression of PVRIG with PD1, TIGIT and HLA-DR in Ovarian Cancer Ascites, PBLs of MSS, CRC, and in Resting and Allo-Activated Healthy PBMCs

[0380] PVRIG is co-expressed with TIGIT on CD8+ T cells in ovarian cancer ascites (data not shown). In this sample, a mixed level of PVRIG expression was observed, that overlapped with that of PD-1 expression. Low level of HLA-DR correlated with low level of PVRIG expression. Very low level of PVRIG was observed on CD4+ T cells is in this specific sample, indicating no correlation with PD1, TIGIT and HLA-DR.

[0381] In PBLs of MSS CRC patients, PVRIG is co-expressed with TIGIT on CD8+ T cells (data not shown). Low expression levels of PVRIG were observed in this sample which was in correlation with the low levels of TIGIT and HLA-DR. TILs from this patient had small CD8+ population that stained positive for surface PVRIG, which was also positive for PD1 and TIGIT (data not shown). Intracellular stain reveled prominent PVRIG stain that mirrored the expression pattern of PD-1, showing two distinct populations that are PD1-PVRIG- and PD1+PVRIG+ (data not shown). Intracellular PVRIG+CD8+ T cells seem to better correlate with the HLA-DR+ and TIGIT+. PVRIG was not detectable on the surface of CD4+ T cells and only minority of the CD4+ cells showed positive intracellular PVRIG stain in the PD1+ population. Due to the very small intracellular PVRIG+ population, it is difficult to determine if PVRIG is co-expressed with TIGIT and HLA-DR.

[0382] In healthy PBMCs, PVRIG stain on CD8 T cells mirrored the expression pattern of PD-1 and TIGIT, showing distinct PD1-PVRIG− and PD1+PVRIG+ populations and distinct TIGIT-PVRIG- and TIGIT+PVRIG+ populations (data not shown). PVRIG was not detected on CD4+ cells. Interestingly, following allo-activation, co-expression of PVRIG and PD-1 was observed on CD4+ (but no on CD8+) (data not shown).

[0383] In summary, PVRIG was shown to co-express with TIGIT in CD8+ T cells from ovarian cancer ascites, MSS CRC patient's PBLs and with PD-1 healthy donor's PBMCs and with PD1 in CD4+ T cells of allo activated PBMCs from healthy donor.

[0384] Specifically incorporated by reference herein is U.S. Ser. No. 62/141,168, filed 31 Mar. 2015, and U.S. Ser. No. 62/118,235, filed 19 Feb. 2015, in their entirety, and in particular for the Examples therein, and for the associated Figures and Legends.

### Example 1F

### Expression of PVRIG on Lymphocyte Populations from Healthy PBMCs Urachal Cancer, Colorectal Cancer, Ovarian Cancer Ascites and Lung Cancer

[0385] Results: The expression of PVRIG on CD4+ and CD8+ T cells, NK cells and on CD4+ and CD8+NKT cells was analyzed in healthy donors' PBMCs and tonsils and in TILs from urachal cancer, colorectal cancer, ovarian cancer ascites, lung cancer and melanoma.

[0386] In healthy donors' PBMCs (n=5) and in ovarian cancer ascites TILs (n=1) high levels of PVRIG expression was detected on NK cells (data not shown) and CD8+NKT cells (data not shown) and to a lower extent also on CD8+ T cells (data not shown) and CD4+NKT (data not shown). CD4+ T cells also stained positively for PVRIG in some of the PBMCs, however the level of expression was quite low (data not shown).

[0387] In addition, PVRIG expression was detected on CD4+ T cells from two out of 6 colorectal cancer TILs tested, and in lung cancer TILs (n=3) (data not shown) and on NK cells from urachal cancer TILs (n=1).

[0388] No PVRIG expression was detected in melanoma TILs due to absence of TILs in the tested sample.

[0389] Specifically incorporated by reference herein is U.S. Ser. No. 62/141,168, filed 31 Mar. 2015, and U.S. Ser. No. 62/118,235, filed 19 Feb. 2015, in their entirety, and in particular for the Examples therein, and for the associated Figures and Legends.

### Example 1G

[0390] Additional evaluations were done to identify addition tissues that over express PVRIG in human and mouse cell lines.

[0391] Reagents: Human PVRIG TaqMan probes (Life technologies) Hs04189293_g1, Cat. #4331182, TaqMan probe for Housekeeping gene (HSKG) (Life technologies) human RPL19 Mm 01577060_gH, human HPRT1 Hs02800695 ml, human SDHA Hs00417200_m1, human PBGD Hs00609296_g1, and human TATA Box Hs00375874_g1. Mouse PVRIG TaqMan probes (Life technologies) CC70L8H, CC6RN19 Custom TaqMan probes. TaqMan probes for Housekeeping gene (HSKG) (Life technologies) mouse RPL19: Mm02601633_g1. ABI TaqMan Fast Advanced Master mix, part no. 4444557, Applied Biosystem. Commercial Human and Mouse cancer cell lines from American Type Culture Collection (ATCC) and CLS (Cell line service) are detailed in Table 1. RNA extraction from human and mouse cell lines was performed with RNAeasy Mini Kit (Qiagen cat #74014). cDNA was produced using High Capacity cDNA Reverse Transcription Kit (Applied Biosystems cat#4368814. Commercial mouse polyclonal Anti-PVRIG Ab MaxPab (B01), Abnova, Cat#H00079037-B01, diluted 1:200. Mouse IgG1, Life Technologies, Cat#MG100, diluted 1:200. Commercial mouse polyclonal Anti-PVRIG Ab, Sigma, Cat#SAB1407935, Chrom pure Mouse IgG, whole molecule, Jackson, Cat#015-000-003, 10 μg/ml. Goat Anti Mouse-PE, Jackson, Cat#115-116-146, diluted 1:100. Custom polyclonal Rat-Anti mouse PVRIG, Batch#20153456C.1, Aldevron, 10 μg/ml. Custom Rat total IgG, Batch#GV20884.1, Aldevron, 10 μg/ml. Goat Anti Rat-PE, Jackson, cat#112-116-143, diluted 1:100. Anti-human PVRIG-CPA.7.024 mIgG1 conjugated to AF647, 10 μg/ml. Anti-human PVRIG-CPA.7.050 mIgG1 conjugated to AF647, 10 μg/ml. Anti-human PVRIG-CPA.7.005 mIgG1 conjugated to AF647, 10 μg/ml. Anti-human PVRIG-CPA.7.002 mIgG1 conjugated to AF647, 10 μg/ml. Synagis IgG1 conjugated to A647, 10 μg/ml. Anti-human PVRIG-CPA.7.021 mIgG1 conjugated to AF647, 10 μg/ml. Synagis IgG2 conjugated to A647, 10 μg/ml. Rabbit polyclonal anti PVRIG Ab, Sigma, Cat#HPA047497, diluted 1:300. Goat Anti Rabbit-HRP, Jackson, Cat#111-035-003, diluted 1:100. VioBlue, Fixable viability stain 450, BD Bioscience, cat #562247, diluted 1:1000. Human Trustain FcX, Biolegend, Cat#422302. Rat anti mouse CD16/CD32 Fc block, BD, Cat#553142. Ingenio Electroporation solution, Mirus, Cat#MIR50114. ON-TARGETplus Human PVRIG siRNA—SMARTpool, Dharmacon, Cat# L-032703-02. ON TARGET plus non targeting siRNA, Dharmacon, Cat# D-001810-01-05. The human cell lines used in the study are shown in FIG. 54.

[0392] Transcript Expression.

[0393] Quantitative RT-PCR (qRT-PCR): RNA (1-5 ug) extraction of human and mouse cell lines (detailed above in Tables 1 and 2) was preformed according to manufactures protocols. cDNA was prepared according to manufactures protocols (1 ug RNA diluted in 20 ul cDNA mix reaction). cDNA, prepared as described above, diluted 1:10 (representing 25 ng RNA per reaction), was used as a template for qRT-PCR reactions, using a gene specific TaqMan probes (as above). Detection was performed using QuantStudio 12 k device. The cycle in which the reactions achieved a threshold level of fluorescence (Ct=Threshold Cycle) was registered and was used to calculate the relative transcript quantity in the RT reactions. The absolute quantity was calculated by using the equation Q=2 ̂−Ct. The resulting relative quantities were normalized to a relative quantities of housekeeping gene, mRPL19 or hRPL19.

[0394] Protein Expression Detection by Western Blot (WB):

[0395] The expression of human PVRIG in human cell lines was analyzed by WB using whole cell extracts (45 ug for the cancer cell lines, and 30 ug for the over expressing cell line and negative control cell line). Commercial rabbit polyclonal anti-human PVRIG pAb, Sigma, cat # HPA047497, diluted 1:300 in 5% BSA/TBST followed by secondary Ab goat anti-Rabbit—Peroxidase conjugated (Jackson, cat #111-035-003), diluted 1:20,000 in 5% milk TBST.

[0396] Protein Expression Analysis by Flow Cytometry (FACS):

[0397] The cell surface expression of PVRIG protein was analyzed by FACS. Human or mouse cell lines were stained with VioBlue reagent diluted 1:1000 in PBS. Cells were incubated 15 min at R.T. and then washed once with PBS. Cell lines for endogenous protein analysis were pre-incubated with the Fc receptor blocking solutions listed above in material section (2.5 μl/reaction of human blocker and 1 μl/reaction of mouse blocker was used according to the manufactures procedures). To detect the human PVRIG protein, cells were stained with a commercial polyclonal anti human PVRIG or by a custom monoclonal anti-human PVRIG mAbs (Inc production, detailed in materials & methods section above) diluted to a concentration of 10 μg/ml or 1:200 (for Sigma Ab and for mAb or for Abnova Ab respectively) or IgG1 Isotype control at the same concentration followed by Goat anti mouse PE conjugated Ab.

[0398] To detect the mouse PVRIG protein, cells were stained with a Custom rat polyclonal anti-mouse PVRIG pAb (Aldevron,) diluted to a concentration of 10 μg/ml or rat IgG whole molecule as isotypes control at the same concentration followed by Donkey anti Rat-PE conjugated Ab diluted 1:100.

[0399] PVRIG knock down: Knock down of endogenous human PVRIG was carried out by transient transfection of siRNA. Transfection of 100 pmol PVRIG siRNA pool or scrambled siRNA performed by electroporation using Amaxa nucleofector device and MIRUS Ingenio electroporation solution, as listed above in materials & methods and according to the manufacture procedure. 48 hours post transfection, cells were collected for further analysis by qRT-PCR and FACS.

[0400] Results:

[0401] Endogenous expression of the PVRIG transcript in human and mouse cell lines by qRT-PCR

[0402] Human Cell Lines:

[0403] In order to verify the presence of the PVRIG transcript in human cell lines (listed in FIG. 54), qRT-PCR was performed using a specific TaqMan probe as describe above in Material & Methods. As shown in FIGS. 56A-56C, human PVRIG transcript is observed using TaqMan probe Hs04189293_g1 with relatively high levels in Jurkat (A, B), HUT78 (A, B) and HL60 (B) cell lines. Lower transcript level is observed in THP1, RPMI8226 (B) cell lines. All other cell lines show very low to no transcript.

[0404] Endogenous Expression of the PVRIG Transcript in Mouse Cell Lines by qRT-PCR:

[0405] In order to verify the presence of the PVRIG transcript in mouse cell lines (listed in FIG. 55), qRT-PCR was performed using a specific TaqMan probe as describe above in Material & Methods. As shown in FIGS. 57A and 57B mouse PVRIG transcript is observed using TaqMan probe CC70L8H with relatively high levels in NIH/3T3, Renca, SaI/N and J774A.1 (A), cell lines. Lower transcript level is observed in CT26 (A) and B-104-1-1(B) cell lines. All other cell lines show very low transcript.

[0406] Endogenous Expression of the PVRIG Proteins in Human Cell Lines by WB:

[0407] WB analysis for endogenous expression of PVRIG protein was carried out on various human cancer cell lines lysates as detailed in FIG. 54 using commercial anti human PVRIG pAb (Sigma, HPA047497) as described in Materials & Methods above. As a positive control, whole cell extract of stable HEK293 cell pool over-expressing PVRIG was used while cells transfected with an empty vector served as the negative control. As shown in FIG. 58, a protein band corresponding to ˜35 kD was detected in the positive control HEK293 over expressing cells (lane 2), as well as in the Jurkat cell line (lane 3). No expression of human PVRIG was detected in the empty vector cells (lane 1) which served as a negative control nor in ZR75-1 human cell line (lane 4).

[0408] Endogenous Expression of the PVRIG Proteins in Human and Mouse Cell Lines by FACS:

[0409] Human cell line: To verify the cell-surface endogenous expression of human PVRIG, various human cell lines (detailed in FIG. 54) were tested as described in Material & Methods above. The cell lines were stained with the commercial Ab (Abnova) or with Isotype control followed by a secondary goat anti mouse PE Ab. Analysis was performed by FACS. Binding of Abnova antibody was observed in Jurkat human cancer cell line as compared to isotype control binding. No binding of Abnova Ab was observed in the other tested cell lines: For Capan2 and ZR75-1 as compared to isotype control binding, additional FACS analysis was done using Sigma commercial Ab on a various human cell lines (Jurkat, HUT78, Karpas299 and NK-YTS), binding was observed in Jurkat cells only but no binding was observed to other cell lines (data not shown).

[0410] Further analysis for endogenous confirmation of human PVRIG in Jurkat cell line, was done by testing binding of various monoclonal antibodies of the invention. Jurkat cell line was stained with five anti-human PVRIG custom mAbs (CPA.7.024, CPA.7.050, CPA.7.005, CPA.7.002 and CPA.7.021) conjugated to AF647 or with relative Isotype control Ab conjugated to AF647 Analysis was performed by FACS. The expression of human PVRIG in Jurkat human cell line was observed by CPA.7.021 and CPA.7.050 only, as compared to isotype control expression. No binding for human PVRIG was observed in Jurkat cell line by using the other three mAbs.

[0411] Mouse Cell Line:

[0412] to verify the cell-surface endogenous expression of mouse PVRIG, various mouse cell lines: J774A.1, NIH/3T3, SaI/N and Renca (detailed in FIG. 55), were tested as described in Material & Methods above. The cell lines were stained with the custom polyclonal rat anti mouse PVRIG Ab (Aldevron), or with Isotype control (Aldevron) followed by a secondary goat anti rat PE Ab. Analysis was performed by FACS. No binding for mouse PVRIG protein was observed in either of the tested mouse cell lines by Aldevron polyclonal Ab (data not shown).

[0413] Knock Down of Human PVRIG in Human Cell Lines:

[0414] In order to further confirm endogenous expression of PVRIG protein in Jurkat cell line, human PVRIG siRNA pool was used for knock down as described in Material & Methods. 48 hours post siRNA transfection, cells were harvested for further analysis by qRT-PCR and by FACS.

[0415] Knock down of human PVRIG in human cell lines tested by qPCR: As shown in FIG. 59, human PVRIG transcript level in Jurkat cells transfected with human PVRIG siRNA pool is significantly reduced (right histogram bar) as compared to cells transfected with scrambled siRNA (left histogram bar) analyzed by qRT-PCR as described in Material & Methods.

[0416] Knock down of human PVRIG in human cell lines tested by FACS: Further analysis of human PVRIG membrane expression in the same siRNA transfected cells was performed by FACS. As shown in FIG. 60 membrane expressions of human PVRIG protein is reduced in cells transfected with PVRIG siRNA (green for CPA.7.021 mAb or red for Sigma Ab) as compared to cells transfected with scrambled siRNA (orange). The fold change (anti PVRIG vs, Isotype control) in Jurkat cell line is decreased from 8 fold to 3.3 fold by using Sigma Ab, or from 15.3 fold to 2.8 fold by using CPA.7.021 mAb.

[0417] This report includes preliminary data on PVRIG endogenous expression in cell lines both at the RNA level and the protein level in human and mouse cell lines.

[0418] Various human cancer cell lines were tested by qRT-PCR, WB and FACS for endogenous expression of PVRIG.

[0419] Cell surface expression of human PVRIG was observed in Jurkat cell line by using the commercial polyclonal Abs (Sigma and Abnova) and the mouse monoclonal Abs (Inc), as shown in FIGS. 4A and 4B respectively. These observations are in correlation to RNA transcript levels as shown in FIGS. 1A & B, and to WB results as shown in FIG. 3.

[0420] Additional confirmation of endogenous human PVRIG in Jurkat cell lines was done by knock down experiment confirming clear reduction in the RNA transcript following PVRIG siRNA transfection, as shown in FIG. 5, and also reduction was observed in the protein cell surface expression in Jurkat cell lines as shown in FIG. 6 by commercial Ab and by monoclonal Ab.

[0421] Various mouse cell lines were tested by qRT-PCR and FACS for endogenous expression of PVRIG. In the transcript level, presence of PVRIG was observed in J774A.1, NIH/3T3, SaI/N and Renca cell lines as shown in FIGS. 2A & B. Although no membrane expression of mouse PVRIG was observed in these tested cell lines detected by polyclonal Ab (Aldevron) (data not shown). FIG. 61 and FIG. 62 indicate the summary of the findings described in this report, highlighting the cell lines showing correlation between qPCR and FACS, confirmed by knock down.

[0422] Specifically incorporated by reference herein is U.S. Ser. No. 62/141,168, filed 31 Mar. 2015, and U.S. Ser. No. 62/118,235, filed 19 Feb. 2015, in their entirety, and in particular for the Examples therein, and for the associated Figures and Legends.

### Example 1H

[0423] The aim of this experiments is to evaluate the expression of PVRIG protein on resting or activated human (Tumor infiltrating lymphocytes) TILs isolated from human melanoma samples and propagated in the presence of melanoma specific antigens and IL2. Human mAb were produced directed against the extracellular domain (ECD) of human PVRIG. These Abs were directly labeled with Alexa flour 647 in order to examine the expression of PVRIG on cells by FACS analysis.

### Materials and Methods

[0424] TILs:

[0425] In this experiments series three different Tumor-infiltrating lymphocyte (TIL) from resected metastases of three melanoma patients were used: 1) TIL-412-HLA-A2-Mart1 specific; 2) TIL-F4-HLA-A2-gp100 specific, and 3) TIL-209-HLA-A2-gp100 specific. Human TILs (>90% CD8+), were thawed 24 h prior to beginning of experiment. Cells were thawed in 12 ml of TIL medium (IMDM+10% human serum+1% Glutamax+1% Na-Pyruvate+1% non-essential amino acids+1% Pen-Strep) supplemented with 300 U/ml of rhIL2 (Biolegend 509129). Cells were left to recover from freezing for 24 hours.

[0426] Assay Conditions:

[0427] After recovery, TILs were tested in four different conditions: 1) Resting—with 300 U/ml of IL2 (Biolegend cat-589106), 2) With polyclonal activation of T cells, using 1 μg/ml of plate bound anti CD3 antibody (eBioscience clone OKT3, cat-16-0037-85)+2 μg/ml of anti CD28 ab (eBioscience clone CD28.2 cat-16-0289-85)+300 U/ml of IL2. 3) Co-cultured (1:1) with Me1888 (LIMS ID: CL-216) melanoma cells (HLA-A2 negative) and 4) Co-cultured (1:1) with Me1624 (LIMS ID CL-218) melanoma cells (HLA-A2+Mart1/gp100 positive).

[0428] After 12 hours of resting/activation/co-culture, cells were tested by FACS for PVRIG expression as well as the expression of other members of PVRIG pathway and other surface markers.

[0429] Staining Cells:

[0430] Cells were harvested after 12 hours and washed twice with PBS. Cells were stained in room temp for 20 minutes with PBS supplemented with 1/1000 of fixable viability stain efluor 450 (BD horizon cat-562247). After staining, cells were washed twice with PBS and stained for 15 minutes on ice with FACS buffer (PBS+0.5% BSA+2 mM EDTA+0.05% Azide) supplemented with 1/25 of human Truestain FC-Block (Biolegend, 422302). After FC-blocking, cells were stained on ice for 30 minutes with the Abs and concentrations that are listed in table 1.

| | | Conjugated | | Catalog | concentration | Staining |
|---|---|---|---|---|---|---|
| Antibodies | Isotype | to | Manufacturer | number | (ug/ul) | concentration |
| Anti-human | Human | AF-647 | Compugen - iNC | CPA.7.021 | 0.2 | 5 μg/ml |
| PVRIG - | IgG2 | | | | | |
| CPA.7.021 | | | | | | |
| Human IgG2 | Human | AF-647 | Compugen - iNC | | 0.2 | 5 μg/ml |
| isotype control | IgG2 | | | | | |
| CD96 | mIgG1 | APC | Biolegend | 338410 | 0.2 | 4 μg/ml |
| PVR | mIgG1 | APC | Biolegend | 337618 | 0.05 | 1 μg/ml |
| PVRL2 | mIgG1 | APC | Biolegend | 337412 | 0.1 | 2 μg/ml |
| TIGIT | mIgG1 | APC | eBioscience | 17-9500-42 | 0.025 | 0.5 μg/ml |
| DNAM1 | mIgG1 | APC | Biolegend | 338312 | 0.1 | 2 μg/ml |
| PD1 | mIgG1 | AF647 | Biolegend | 329910 | 0.1 | 2 μg/ml |
| CD8 | mIgG1 | FITC | Biolegend | 300906 | 0.15 | 3 μg/ml |

[0431] After staining, cells were washed once and re-suspended in FACS buffer for analysis. Compensation calibration was done using compensation beads (BD, 552843). One drop of beads were stained for 30 minutes with above antibodies. Beads staining was done with same concentrations as cell staining. After beads staining, compensation was performed on MacsQuant FACS machine according to standard procedure. All samples were acquired on a MACSQuant analyzer (Miltenyi) and data was analyzed using Tree Star FlowJo software (v10.0.8).

[0432] PVRIG is Expressed on Human Resting TILs:

[0433] Resting TILs, cultured for 12 hours with 300 U/ml of IL2 only, were stained for PVRIG expression and analyzed by FACS. Gating strategy for TILs: Lymphocytes were gated first according to size and granularity in FCS:SSC graph, than single cells were gated according to FSC-H and FSC-A, than live cells were gated according to viability Dye staining in Vioblue:FSC graph, than CD8⁺ cells were gated according to CD8 staining in CD8:FSC graph. Expression levels of PVRIG was than plotted according to PVRIG staining in histograms.

[0434] PVRIG Expression on Human TILs is Downregulated Upon Activation with Anti CD3+ anti CD28 abs:

[0435] Human TILs, cultured for 12 hours with anti CD3+ anti CD28 abs+IL2 were stained for PVRIG expression and analyzed by FACS. PVRIG expression on surface of all three TILs examined is downregulated upon activation, comparing to resting TILs (data not shown).

[0436] PVRIG Expression on Human TILs is Slightly Downregulated Upon Co-Culture with Me1888:

[0437] Human TILs, co-cultured for 12 hours with Me1888 cells were stained for PVRIG expression and analyzed by FACS. PVRIG expression on surface of all three TILs examined is slightly downregulated upon co-culture with Me1888 comparing to resting TILs.

[0438] PVRIG Expression on Human TILs is Downregulated Upon Co-Culture with Me1624:

[0439] Human TILs, co-cultured for 12 hours with Me1624 cells were stained for PVRIG expression and analyzed by FACS.PVRIG expression on surface of all three TILs examined is slightly downregulated upon co-culture with Me1624 comparing to resting TILs.

[0440] Expression of Other Pathway Members on Resting TILs:

[0441] Human TILs, co-cultured for 12 hours with IL2 only were stained for the expression of CD96, PVR, PVRL2, TIGIT and DNAM1 and analyzed by FACS. CD96, TIGIT and DNAM1 is expressed on all three examined TILs. PVR is expressed on the surface of all three TILs as well but to relatively low levels. PVRL2 is not detected on any of the TILs.

[0442] Expression of Other Pathway Members on TILs Activated with Anti CD3 and Anti CD28 abs:

[0443] Human TILs, cultured for 12 hours with anti CD3 and anti CD28 abs were stained for the expression of CD96, PVR, PVRL2, TIGIT and DNAM1 and analyzed by FACS. Upon activation with anti CD3+ anti CD28 abs, CD96 is downregulated, PVR is slightly upregulated, TIGIT is slightly upregulated and DNAM1 is upregulated as well.

[0444] Expression of Other Pathway Members on TILs Co-Cultured with Me1888:

[0445] Human TILs, co-cultured for 12 hours with Me1888 cells were stained for the expression of CD96, PVR, PVRL2, TIGIT and DNAM1 and analyzed by FACS. Upon co-culture with Me1888, CD96 is downregulated, PVR is highly upregulated, TIGIT and DNAM1 is downregulated, PVRL2 is slightly induced as well.

[0446] Expression of Other Pathway Members on TILs Co-Cultured with Me1624:

[0447] Human TILs, co-cultured for 12 hours with Me1624 cells were stained for the expression of CD96, PVR, PVRL2, TIGIT and DNAM1 and analyzed by FACS. Gating strategy was done according to FIG. 1. Upon co-culture with Me1624, CD96 is downregulated, PVR is highly upregulated, TIGIT is stable or slightly upregulated, DNAM1 is downregulated and PVRL2 is slightly induced.

[0448] Expression of PD1 on TILs:

[0449] Human TILs, cultured for 12 hours with IL2 only or activated with anti CD3+ anti CD28 abs or co-cultured with Me1888 or with Me1624 cells were stained for the expression of PD1 and analyzed by FACS. As can be seen in FIG. 16 and FIG. 17, PD1 is expressed on resting TIL412 only. No change in PD1 expression is noticed upon co-culture with Me1888, But, PD1 is upregulated in all three TILs upon co-culture with Me1624 or upon activation with anti CD3+ anti CD28 abs.

[0450] Summary and Conclusions:

[0451] For all TILs that were tested:
[0452] Anti PVRIG—CPA.7.021 ab stains TILs (up to 2.6 fold)
[0453] PVRIG expression is downregulated upon activation of 12 hours with anti CD3+ anti CD28 abs or upon co-culture with Me1624 (almost to background level).
[0454] Resting TILs express CD96, TIGIT and DNAM1 (up to 35, 12 and 79 fold respectively)
[0455] CD96 expression is downregulated upon activation (from up to 35 to ˜11 fold) or co-culture with irrelevant (HLA-A2-) melanoma
[0456] DNAM1 expression is upregulated upon activation with αCD3/CD28 abs (from up to 79 to 102 fold) but strongly downregulated upon co-culture of TILs with Mels (down to 8 fold).
[0457] TIGIT expression is slightly downregulated upon co-culture of TILs with mel888 cell line, and was stable with a slight upregulation upon co-culture with Me1624 or activation with anti CD3+ anti CD28 abs.
[0458] PD1 expression is upregulated upon activation (from 0 up to 18 fold)
[0459] High levels of PVR were detected following TILs co-culture with melanomas (from <2 up to 18 fold).

[0460] Resting TIL-412 show positive staining for PD1. TIL-F4 is also slightly positive for PD1 whereas TIL-209 is negative. Summary of changes in expression levels of all parameters tested, in the different conditions can be seen in Table 2.

TABLE 2

| | +IL2 | +αCD3+αCD28+IL2 | +Mel888 | +Mel624 |
|---|---|---|---|---|
| PVRIG | 1.4-2.6 | 0-12 | 1.3-1.7 | 0-1.2 |
| CD96 | 23-35 | 12.7-16 | 11.7-17.6 | 11.1-16.6 |
| TIGIT | 5.7-12.6 | 7.8-12.5 | 4-7.3 | 6.1-12.5 |
| DNAM1 | 43-79 | 56-100 | 14-20 | 17-25 |
| PVR | 1.6-1.8 | 2.6-3.2 | 13.6-18 | 11-17 |
| PVRL2 | 0 | 0 | 1.4-2.3 | 1.2-1.8 |
| PD1 | 0-4.5 | 2.3-18.4 | 0-4.6 | 2-9.3 |

[0461] Specifically incorporated by reference herein is U.S. Ser. No. 62/141,168, filed 31 Mar. 2015, and U.S. Ser. No. 62/118,235, filed 19 Feb. 2015, in their entirety, and in particular for the Examples therein, and for the associated Figures and Legends.

### Example 1I: Expression of PVRIG on Resting and Activated Human T Cells and TILs

[0462] The aim of this example was to evaluate the expression of PVRIG protein on resting and activated human isolated primary CD4+ and CD8+ T cells, as well as TILs (Tumor Infiltrating Lymphocytes) isolated from human melanoma samples and propagated in the presence of melanoma specific antigens and IL2. Human mAbs were produced against the extracellular domain (ECD) of human PVRIG. These Abs were directly labeled with Alexa flour 647 in order to examine the expression of PVRIG on cells by FACS analysis.

### Materials and Methods

[0463] TILs: In this series of experiments, two different TILs, from resected metastases of three melanoma patients, were used:

[0464] TIL-Mart1-HLA-A2-Mart1 specific

[0465] TIL-209-HLA-A2-gp100 specific

[0466] Human TILs (>95% CD8+), were thawed 24 h prior to beginning of experiment. Cells were thawed in 12 ml of TIL medium (IMDM+10% human serum+1% Glutamax+1% Na-Pyruvate+1% non-essential amino acids+1% Pen-Strep) supplemented with 300 U/ml of rhIL2 (Biolegend 509129). Cells were left to recover for 24 hours.

[0467] Primary T cell: In this series of experiments two different donors were used:

[0468] CD4+ and CD8+ from donor #147

[0469] CD4+ and CD8+ from donor #186

[0470] Human primary cells (>95% purity), were thawed 24 h prior to beginning of experiment. Cells were thawed in RPMI complete medium (RPMI+10% FBS+1% Glutamax+1% Na-Pyruvate+1% Pen-Strep) supplemented with 300 U/ml of rhIL2 (Biolegend 509129). Cells were left to recover for 24 hours.

[0471] Assay Conditions:

[0472] After recovery, cells were activated using a polyclonal activation of T cells, with 1 μg/ml of plate bound anti CD3 antibody (BD-pharmingen clone Ucht-1, cat-555329), 2 μg/ml of anti CD28 ab (eBioscience clone CD28.2 cat-16-0289-85) and 300 U/ml of IL2.

[0473] Activation was carried out for 24 h, 48 h, 72 h and 144 h.

[0474] Staining Cells:

[0475] Cells were harvested and washed with PBS. Cells were stained at room temperature for 10 minutes with PBS supplemented with 1/1000 of fixable viability stain efluor 450 (BD horizon cat-562247). After staining, cells were washed twice with PBS and stained with the Abs at the concentrations listed in FIG. 65 for 30 minutes on ice in FACS buffer (PBS+0.5% BSA+2 mM EDTA+0.05% Azide) and concentrations that are listed in FIG. 65. After staining, cells were washed once and re-suspended in FACS buffer for analysis.

[0476] Results:

[0477] Human T cells from two different donors and TILs were left untreated (resting) or polyclonal stimulated for various timepoints as described in Materials and Methods. Cell activation state was evaluated by detection of surface expression of CD137 and PD-1 at each time point compared to isotype control (FMO), as shown for activated CD8+, CD4+ T cells and TILs (FIGS. 70A, B & C respectively). As expected, PD-1 and CD137 expression was detected and elevated upon activation (FIGS. 70A, B & C).

[0478] PVRIG expression was observed on both resting CD4+ and CD8+ T cells, with higher expression on CD8+ cells (6-8 fold) as compared to CD4+ cells (3 folds), and diminished upon activation (FIGS. 71A, B & C). On days 3-6 of activation, PVRIG expression was increased on CD8+(4-5 fold) and CD4+(2-3 fold) T cells, as can be seen in FIGS. 71A, B & C.

[0479] In addition, PVRIG expression was also observed on Mart1 and 209 resting TILs, and expression was decreased upon activation (FIGS. 72A, B & C). On day 3-6 of activation PVRIG expression was increased, as can be seen in FIG. 72, compared to day 1-2 of activation.

### Example 2: Generation and Characterization of PVRIG-Expressing Stable Transfectant Cell Pools

[0480] Recombinant stable pools of cell lines overexpressing PVRIG human and mouse proteins were generated, for use in determining the effects of PVRIG on immunity, for PVRIG characterization and for identifying immunoregulatory PVRIG based therapeutic agents.

### Materials & Methods:

[0481] Reagents: DNA Constructs:

[0482] Human PVRIG flag pUC57

[0483] Human PVRIG flag pCDNA3.1

[0484] Human PVRIG flag pMSCV

[0485] Recombinant Cells:

[0486] HEK293 pCDNA3.1 Human PVRIG flag

[0487] HEK293 pMSCV Human PVRIG flag

[0488] Commercial Antibodies:

[0489] Anti PVRIG, Sigma cat. HPA047497—Rabbit polyclonal

[0490] Anti-PVRIG, Abnova cat. H00079037-B01—Mouse polyclonal

[0491] Full length validation of mouse PVRIG was done using PCR reactions and sequencing of the PCR products.

[0492] Three couples of primers were used (Table 3).

TABLE 3
Sequence of primers used for mouse full
length validation

| Primer name | Sequence |
|---|---|
| 200-554_mPVRIG_F | CCACCAACCTCTCGTCTTTC |
| | (SEQ ID NO: 1547) |
| 200-553_mPVRIG_R | TCATGCCAGAGCATACAG |
| | (SEQ ID NO: 1548) |
| 200-571_mPVRIG_F | CAGTGCCTCTAACTGCTGAC |
| | (SEQ ID NO: 1549) |
| 200-572_mPVRIG_R | TCACTGTTACCAGGGAGATGAG |
| | (SEQ ID NO: 1550) |
| 200-549_mPVRIG_F | CACAGGCTGCCCATGCAAC |
| | (SEQ ID NO: 1551) |
| 200-551_mPVRIG_R | TGCCTGGGTGCTAGTGAGAG |
| | (SEQ ID NO: 1552) |
| 200-554_mPVRIG_F | CCACCAACCTCTCGTCTTTC |
| | (SEQ ID NO: 1553) |
| 200-546_mPVRIG_R | GACCCTGTTACCTGTCATTG |
| | (SEQ ID NO: 1554) |

[0493] As a templet for the PCR reaction, cDNA of NIH 3T3 cell line or a mix of three commercial cDNA panels were used:
[0494] 1. cDNA panel I, Mouse, Biochain, Cat no. C8334501 (Heart, Brain, Kidney, Liver).
[0495] 2. cDNA panel II, Mouse, Biochain, Cat no. C8334502 (Lung, Pancreas, Spleen, Skeletal Muscle).
[0496] 3. cDNA, Clontech, Cat no. 637301, (Brain, Heart, day 7 Embrio, Testis, Spleen).

[0497] Expression Constructs

[0498] Full length cloning of human and mouse PVRIG-flag was performed by gene synthesis (GenScript) using codon optimized sequence in pUC57 vector for human transcript and non optimized for mouse transcript and subcloned into a mammalian expression vector, pcDNA3.1 or to pMSCV, to create the expression plasmid.

[0499] Human PVRIG sequence that was subcloned into pcDNA3.1 initiate from the second methionine of human PVRIG protein, whereas the human PVRIG sequence that was subcloned into pMSCV initiate from the first methionine of human PVRIG protein.
[0500] Construct encoding the Human PVRIG-flag.

[0501] Full length human PVRIG gene, synthesis by GenScript was subcloned into using pcDNA3.1 using BamI and NheI restriction enzymes.

[0502] Constructs encoding the mouse PVRIG proteins:

[0503] Four contracts encoding the mouse sequence were synthesize by GenScript as following:

### 1. First Methionine no tag

[0504] 2. First Methionine with Flag

### 3. Second Methionine no tag

[0505] 4. Second Methionine with Flag

[0506] The synthesize gene were subcloned into pCDNA3.1

[0507] Generation of stable transfectants over expressing PVRIG proteins

[0508] The resulting expression construct was verified by sequence and subsequently used for transfections and stable pool generation as described below. The protein sequences encoded by the expression constructs are as set forth in FIGS. 103A-103BX.

[0509] Generation of stable transfectant pools expressing human PVRIG-flag protein

[0510] HEK293 (ATCC, catalog number: CRL-1573) cells were transfected with pCDNA3.1+ human PVRIG-flag plasmid or with empty vector (pCDNA3.1+ as negative control), using FUGENE 6 Reagent (Roch, catalog number 11-988-387). Geneticin, G418 (Gibco, catalog number: 11811-031) resistant colonies were selected for stable pool generation.

[0511] GP2-293 packaging cell line (Clontech cat#631458) was transfected with pMSCV-human PVRIG or with pMSCV empty vector using Lipofectamine 2000 transfection reagent (Invitrogen, catalog number 11668019). 48 hours post transfection supernatants containing virions were collected, and directly used for infection of the human cell line as follows:

[0512] HEK-293 (ATCC, CRL-CRL-1573) cells was infected with virions expressing human PVRIG or with pMSCV empty vector virions as negative control, Puromycin (Invivogen, catalog number: 58-58-2) resistant colonies were selected for stable pool generation.

[0513] Expression Validation

[0514] Expression Validation by Western Blot

[0515] Whole cell extracts of cell pool (30 ug of total protein) were analyzed by western blot. As negative control, whole cell extracts of stable cell pools transfected with the empty vector were used. For the human PVRIG-flag detection, anti-flag and anti PVRIG antibodies were used as follow:
[0516] Mouse anti Flag M2-Peroxidase, Sigma, cat. A8592 diluted 1:1000 in TTBS/5% BSA;
[0517] Anti PVRIG, Sigma cat. HPA047497—Rabbit polyclonal, diluted 1:200 in TTBS/5% BSA. Followed by Goat Anti Rabbit-HRP, Jackson, Cat: 111-035-003 diluted 1:20,000 in 5% milk/TTBS solution.

[0518] Expression Validation by Flow Cytometry (FACS)

[0519] In order to validate the cell surface expression of the human PVRIG protein in the recombinant stable pools, 1×10⁵ cells were stained with Fixable viability stain 450 (BD, 562247) diluted 1:1000 in PBS, for 10 min at R.T. Mouse polyclonal anti PVRIG, (Abnova, Cat. H00079037-B01) diluted 1:200 or with mouse IgG1 isotype control (Life Technologies), were then added to cells followed by staining with Goat Anti Mouse-PE (Jackson, cat. 115-116-146).

[0520] Results Expression Validation of HEK293 Stable Pool Cells Over Expressing the Human PVRIG-Flag Protein

[0521] To verify expression of the PVRIG protein in the stably transfected HEK293 cells pools, whole cell extracts were analyzed by western blot using anti-flag antibody or anti PVRIG antibodies (Abnova), as described in Material and Methods. The results, shown in FIG. 24, demonstrate a band corresponding to the expected protein size of ˜33 kDa in the extracts of HEK293 cell pools expressing human PVRIG, but not in the cells transfected with the empty vector.

[0522] In order to verify cell surface expression of the PVRIG protein, HEK293 stably transfected cells over-expressing the PVRIG-flag pCDNA3.1 vector were analyzed by FACS using mouse anti-PVRIG pAb (Abnova) as described in Material and Methods. The results presented in FIG. 25 show that the binding of mouse anti-PVRIG pAb to cells stably expressing the human PVRIG-flag (gray) is higher than that observed with cells transfected with the empty vector (light gray).

### Example 3: PVRIG-ECD Ig Fusion Protein Production

[0523] PVRIG mECD-mIg fusion protein (see FIGS. 103A-103BX), composed of the ECD of mouse PVRIG fused to the Fc of mouse IgG2a, was produced at ProBioGen (Germany) in CHO-DG44 cells by culturing stable cell pools for 12 days, followed by Protein A purification of cell harvest and preparative SEC purification for aggregate removal. The final product was formulated in 5 mM Na citrate, 5 mM Na/K phosphate, 140 mM NaCl, 0.01% Tween pH5.5.

[0524] Expression vector used was ProBioGen's PBG-GPEX6. PVRIG gene is driven by CMV/EF1 hybrid promoter followed by polyadenylation signal pA-1. The vector contains puromycin N-acetyl-transferase gene that allows selection of transfected cells using puromycin, as well as dehydrofolate reductase gene that allows selection of transfected cells using methotrexate (MTX).

[0525] PVRIG hECD-hIg fusion protein (see FIGS. 103A-103BX), composed of the ECD of human PVRIG fused to the Fc of human IgG1 bearing C220, C226 and C229 to S mutations at the hinge, was produced at GenScript (China) by transient transfection in CHO-3E7 cells which were cultured for 6 days, followed by protein A purification of cell harvest. The final product was formulated in PBS pH 7.2.

[0526] Expression vector used was Mammalian Expression Vector pTT5, in which PVRIG gene is driven by CMV promoter.

### Example 4: Expression of PVRIG on Human PBLs and Binding of PVRIG-Fc to Melanoma Cell Lines

[0527] PVRIG is a novel immune checkpoint protein, which without wishing to be limited by a single theory functions as a CD28 like receptor on T cells. In this study, the expression of PVRIG on human peripheral blood lymphocytes and the binding of PVRIG-ECD-Ig (composed of the extra-cellular domain of human PVRIG fused to human IgG1) to melanoma cell lines was evaluated.

### Materials and Methods

[0528] Three human melanoma cell lines which present the MART-1 antigen in HLA-A2 context (SK-MEL-23, Mel-624 and Mel-624.38) were used as targets for CTLs. Mel-888 which does not express HLA-A2, served as a negative control.

[0529] Buffy coats from human healthy donors were obtained from Tel Hashomer Blood Bank. Peripheral blood mononuclear cells were stimulated with PHA and cultured for 3 days, and subsequently transduced with MSCV-based retroviral vector (pMSGV1). Following transduction, cells were further grown in lymphocyte medium (Bio target medium, fetal bovine serum (10%), L Glutamine Penicillin/Streptomycin (100 units/ml), IL-2 300 IU) for additional 5 days.

[0530] To evaluate PVRIG expression on PBLs, cells were stained with a specific antibody for PVRIG (mouse poly clonal) at 5 μg/ml for 30 min at 4 degrees. Following washing, cells were stained with FITC conjugated Goat anti mouse mAb (1:250) (Invitrogen, Cat# A10667) in FACS buffer in the dark for 30 minutes at 4 degrees. Following two washes in FACS buffer, samples were read on a BD Bioscience FACS Calibur with a Cytek HTS.

[0531] To evaluate binding of PVRIG-Ig to the melanoma cell lines, SK-MEL-23, Mel-624, Mel-624.38 and mel-888, cells were co-cultured with F4 transduced or un-transduced (designated w/o) PBLs and subsequently stained with 20 μg/ml of the fusion protein PVRIG-Ig HH batch #125. Following two washes in FACS buffer, samples were stained with a secondary goat anti-human PE (Jackson, cat#109-116-098).

### Results

[0532] To evaluate the endogenous expression of PVRIG on primary human leukocytes, PBLs were stimulated with PHA and subsequently transduced with an empty vector and stained with an anti-PVRIG specific antibody. As shown in FIG. 11, in two different donors staining with anti-PVRIG is observed relative to an isotype matched control.

[0533] To evaluate the endogenous expression of PVRIG on melanoma cell lines and to determine whether the endogenous expression is affected by co-culture with antigen specific T cells, 4 different melanoma cell lines (SK-MEL-23, Mel-624, Mel-624.38 and mel-888) cu-cultured with PBLs either expressing or not expressing the F4 (gp100 specific TCR). Cells were subsequently stained with the fusion protein composed of the extra-cellular domain of human PVRIG fused the Fc portion of human IgG1. As shown in FIG. 12, all 4 tested human melanoma cell lines exhibit binding to PVRIG-Ig. Binding intensity is not affected by T cell dependent activation following co-culture with melanoma reactive engineered T cells.

[0534] Summary:

[0535] The results presented herein suggest that PVRIG is expressed on PHA activated human primary peripheral blood leukocytes (PBLs). In addition, 4 melanoma cell lines that were tested in this study bind to the fusion protein composed of the extra-cellular domain of human PVRIG fused the Fc portion of human IgG1 suggesting that these cell lines express the counterpart for PVRIG.

### Example 5: Receptor-Ligand Identification and Validation

[0536] A first validation study was performed using a cell microarray technology was used to screen for interactions of PVRIG to 3559 full-length human plasma membrane proteins, which were individually expressed in human HEK293 cells.

[0537] Human HEK293 cells were grown over slides spotted with expression vectors encoding 3559 full-length human membrane proteins. An expression vector (pIRES-hEGFR-IRES-ZsGreen1) was spotted in quadruplicate on every slide, and was used to ensure that a minimal threshold of transfection efficiency had been achieved or exceeded on every slide. Human HEK293 cells were used for reverse transfection/expression. A fusion protein composed of the ECD of PVRIG fused to a human IgG1 was added at 20 μg/ml to each slide following cell fixation. Detection of binding was performed by using an appropriate fluorescent secondary antibody. Two replicate slide-sets were screened. Fluorescent images were analyzed and quantitated (for transfection efficiency) using ImageQuant software (GE).

[0538] A protein ‘hit’ was defined as a duplicate spot showing a raised signal compared to background levels. This was achieved by visual inspection using the images gridded on the ImageQuant software. Hits were classified as ‘strong, medium, weak or very weak’, depending on the intensity of the duplicate spots. To confirm the hits, all vectors encoding the hits identified in the primary screen were arrayed on new slides. Confirmation/Specificity screen and analyses was carried out as for primary screening (n=2 replicate slides per sample), except that identical slides were also probed with appropriate negative controls. Additionally, all the vectors encoding the hits were sequenced. Vectors encoding every primary hit was sequenced confirming its identity.

[0539] Background screen showed negligible binding to untransfected HEK293 cells at 2, 5 and 20 μg/ml (FIG. 13). Based upon the background data, 20 μg/ml was chosen for full profiling. Primary screen resulted in multiple duplicate hits (clones), with the majority being weak or very weak intensity. All primary hits identified, and a control EGFR-ZsGreen1 vector, were spotted and re-expressed in duplicate and probed with PVRIG at 20 μg/ml for the Confirmation/Specificity screen.

[0540] A single specific hit, PVRL2, with strong intensity, was identified (FIG. 14). Another weak hit, MAG, was later shown to bind also other fusion proteins tested (data not shown), thus suggesting that it is not specific. These results are consistent with the recently published abstract https://www.yumpu.com/en/document/view/7263720/sunday-december-4-late-abstracts-1-molecular-biology-of-the-/133 by G. Quinones in New Technologies & Frontlers. PVRL2 is known to play a role as a ligand for TIGIT and DNAM1, which are both modulators of T cell and NK cell activation. TIGIT has been recently reported to be a key player in the inhibition of the immune response directed against tumor cells (Noa Stanietsky, journal of immunology, vol. 106 no. 42, 17858-17863; Robert J Johnston, Cancer cell, Volume 26, Issue 6, p 923-937, 8 Dec. 2014). Results presented in Example 5, showing interaction of PVRIG with the same counterpart as TIGIT, suggests an involvement of PVRIG in an important regulatory pathway that regulates cancer immune surveillance and thus positions PVRIG as a potential target for cancer treatment.

### Additional Validation Study 2

### Materials and Methods

### Materials

[0541] Fc Fusion Proteins, his-Tagged Proteins and Control Ig:

[0542] The Fc fusion protein PVRIG-Fc M:M was used for binding studies. Mouse IgG2a was used as isotype control. Other commercial mouse proteins used in the study were PVRL2-his (R&D, 3869-N2), and PVRL2-his (Sino Biological, 50318-M08H).

[0543] Cells:

[0544] HEK293 over-expressing (OX) mouse PVRIG and PVRIG-FLAG were generated (RC-287 and RC-286, respectively) and binding of PVRL2 to these cells was compared to HEK293 cells expressing empty vector (EV) (RC-83). HEK293 OX mouse PVRL2 splice variants 1 and 2 (sv1 and sv2) were generated (RC-334 and RC-335, respectively) and binding of PVRIG to these cells was compared to HEK293 cells expressing EV. B16-F10 cells (CL-161, mouse skin melanoma cells endogenously expressing mPVRL2) were also used to study the interaction between PVRIG and PVRL2.

[0545] Antibodies:

[0546] Anti-mouse PVRL2-PE Ab (R&D, FAB3869P, 25 μg/ml, 1:100) was used for detection of PVRL2. Rat IgG2A-PE (R&D, IC006P, 25 μg/ml, 1:100) was used as isotype control. Anti-mouse-PE (Jackson Immunoresearch, 115-115-206, 0.5 mg/ml, 1:200) and anti-his Ab (Abcam, ab72467, 0.1 mg/ml, 1:300) were used to detect binding of recombinant proteins. Anti-DYKDDDDK Tag (“DYKDDDDK” disclosed as SEQ ID NO:1555) (anti-FLAG) Ab (BioLegend, 637302, 0.5 mg/ml, 1:300) was used for detection of PVRIG expression on HEK293 OX mouse PVRIG-FLAG. For PVRIG labeling, Alexa Fluor® 647 Antibody Labeling Kit (Molecular Probes, A-20186) was used according to manufacturer's protocol. For biotinylation of PVRIG, DSB-X™ Biotin Protein Labeling Kit (Molecular Probes, D-20655) was used according to manufacturer's protocol. Biotinylated PVRIG was detected by streptavidin-PE (SA-PE) (Jackson Immunoresearch, 016-110-084, 0.5 mg/ml, 1:300).

### Methods

[0547] FACS Analysis of Mouse PVRIG-Fc Binding to Stable HEK293 Cells Over-Expressing (OX) Mouse PVRL2 or to B16-F10 Cells:

[0548] HEK293 cells OX PVRL2 (sv1 or sv2) or B16-F10 cells were suspended to 10⁶ cells/ml in PBS. For each 1 ml of cells, 1 μl of viability stain stock solution (BD Horizon Fixable Viability Stain 450, cat. 562247, BD Bioscience) was added. Cells were incubated for 10 min protected from light at room temperature. The cells were then washed twice with PBS and suspended to 3×10⁶ cells/ml in the presence of 1:50 human TruStain FcX™ (BioLegend 422302) in FACS buffer (PBS supplemented with 2% FBS and 0.5 mM EDTA) at room temperature for 15 min for blocking of Fcγ-receptors. Without washing, 1×10⁵ cells/well were then plated in 96-well V-shaped plates (Costar #3357). Expression of PVRL2 was examined by anti-PVRL2 antibody (see above). Binding of PVRIG-Fc to cells was examined with various batches (see above), generally at 60 μg/ml or with several concentrations. Cells were incubated with antibodies or PVRIG-Fc for 40 min at room temperature, then washed once. Secondary antibody (anti-mouse-PE) was added for 15 min at room temperature, cells were washed twice and were taken for analysis by MACSQuant® FACS analyzers (Miltenyi Biotec), followed by data analysis using Flow-Jo 10 software.

[0549] FACS Analysis of Mouse PVRL2-his Binding to Stable HEK293 Cells OX Mouse PVRIG:

[0550] PVRIG levels were examined with anti-FLAG antibody. PVRL2-his binding was monitored by anti-his antibody. FACS analysis was performed as described above.

[0551] Biophysical SPR Analysis of Mouse PVRIG/PVRL2 Interaction by Biacore:

[0552] The interaction between mouse PVRIG and PVRL2 was analyzed in a Biacore T100 SPR biomolecular interaction analyzer at Bar-Ilan University. Proteins were diluted to 100 nM in acetate buffer pH 4.0, and were covalently coupled to a unique flow cell of a CM5 Series S Biacore chip using standard amine coupling chemistry. Surfaces were activated with EDC-NHS, and later blocked by injection of 1M ethanolamine (pH 8.5). Running buffer was 10 mM Hepes pH 7.3, 150 mM NaCl, 3 mM EDTA and 0.05% Tween-20 (HBS-EP+). Final immobilization levels were ˜1000 RU. Proteins used as analytes were diluted to 2500 nM, 500 nM and 100 nM. In each run one tube contained running buffer only for reference. After each run a regeneration step with 4M MgCl2 for 30 sec at 20 μl/sec was performed.

### Results

[0553] Binding of Mouse PVRIG to HEK293 Cells OX PVRL2 Sv1:

[0554] In order to validate the interaction between mouse PVRIG and mouse PVRL2 we first tested the binding of PVRIG-Fc to cells over-expressing (OX) PVRL2. The level of PVRL2 expression on HEK293 OX PVRL2 sv1 was determined using specific anti-mouse PVRL2 antibodies. Mouse PVRL2 expression was 10-fold higher compared to HEK293 cells expressing empty vector (data not shown). Four batches of PVRIG-Fc were examined for binding to PVRL2 OX cells. All PVRIG-Fc batches showed 6-11-fold binding to cells OX PVRL2 compared to empty vector cells (data not shown). Binding of PVRIG-Fc to PVRL2 OX cells was also examined using biotinylated and fluorescently labelled (Alexa Fluor 647) PVRIG proteins. While the biotinylated proteins displayed slightly stronger binding to PVRL2 OX cells compared to untagged PVRIG-Fc (data not shown), fluorescently labelled PVRIG demonstrated much lower binding (data not shown). These results show that PVLR2 is detected on the membrane of HEK293 cells OC PVRL2; binding of mouse PVRIG-Fc to PVLR2 OX cells is detected by anti-mouse IgG2A antibodies; binding of biotinylated mouse PVRIG-Fc to PVLR2 OX cells is detected by streptavidin-PE, and binding of Alexa Fluor 647-labeled PVRIG-Fc to PVLR2 OX cells.

[0555] Binding of Mouse PVRL2 to HEK293 Cells OX PVRIG:

[0556] To further validate the interaction between mouse PVRIG and mouse PVRL2 we tested the binding of PVRL2 to cells OX PVRIG with or without a FLAG-tag. Membrane expression of mouse PVRIG on HEK293 cells OX PVRIG with a FLAG-tag was confirmed using an anti-FLAG antibody (data not shown). As expected, HEK293 cells OX PVRIG without a FLAG-tag showed no expression using an anti-FLAG antibody. Using anti-PVRIG supernatants (Aldeveron), these cells demonstrated lower expression of PVRIG compared to cells OX PVRIG with a FLAG-tag. Commercial mouse PVRL2 recombinant protein was available only as a His-tagged protein. Therefore, extensive calibrations were required to obtain an appropriate anti-His antibody and conditions for detection. His-tagged PVRL2, from two different sources, were tested for binding to PVRIG OX cells at 60 μg/ml and demonstrated 2-fold (data not shown) and 3-4 fold (data not shown) binding compared to HEK293 cells expressing empty vector. That is, his-tagged mouse PVLR2 binds HEK293 OX mouse PVRIG, and mouse PVRIG is expressed on membranes of HEK293 cells OX PVRIG.

[0557] Study of Mouse PVRIG and Mouse PVRL2 Interaction Using SPR-Biacore:

[0558] In order to assess the interaction between mouse PVRIG-Fc and mouse His-tagged PVRL2, both proteins were immobilized to a Biacore chip. Following immobilization, both proteins, as well as PVRIG-Fc (data not shown) were run as analytes at three concentrations: 2500, 500 and 100 nM (PVRIG batch #480 and PVRL2 were run twice as analytes). Interaction between the two proteins was detected in both directions and with both batches of PVRIG (data not shown). Due to complex kinetics, an exact KD could not be determined from the Biacore results.

[0559] Dose Response Binding of Mouse PVRIG to HEK293 Cells OX PVRL2 sv2 and B16-F10 Cells:

[0560] As shown above, mouse PVRL2 binding to mouse PVRIG OX cells was relatively low. In order to establish a method for screening anti-mouse PVRIG antibodies capable of blocking the interaction between mouse PVRIG and mouse PVRL2, the binding of PVRIG-Fc to PVRL2 OX cells was selected. First, a dose response binding curve of mouse IgG2A and mouse PVRIG-Fc to cells OX mouse PVRL2 was generated and compared to cells expressing empty vector (EV). The dose response was performed in two-fold serial dilutions (1:2) from 50 μg/ml to 0.1 μg/ml. While no difference in mouse IgG2A binding was observed (data not shown), PVRIG-Fc demonstrated saturation of binding at 12.5 μg/ml and reduced binding in correlation with the decrease in protein concentration (data not shown). Similar results were obtained also with PVRIG-Fc (data not shown). These results suggest that this binding assay can be considered for screening of blocking antibodies.

[0561] In order to consider also an endogenous system for screening of anti-mouse PVRIG antibodies, the expression of PVRL2 on B16-F10 cells was assessed using an anti-PVRL2 antibody. Results show that PVRL2 is highly expressed on B16-F10 cells (data not shown). Therefore, a similar dose response binding curve was produced also for binding of mouse IgG2A and mouse PVRIG-Fc to B16-F10 cells. Similarly to the results obtained with HEK293 cells OX PVRL2, mouse PVRIG-Fc demonstrated dose response binding to B16-F10 cells reaching saturation at 12.5 μg/ml, while no change in binding of mouse IgG2A was detected (data not shown).

[0562] Discussion and Conclusions:

[0563] Human PVRIG interaction with human PVRL2 was identified using Cell Microarray Technology at Retrogenix. To validate this interaction also in mouse, several approaches were taken. Among them the use of PVRIG or PVRL2 OX cells, and biophysical measurements using SPR-Biacore. All approaches indicated that mouse PVRIG interacts with mouse PVRL2. However, the binding of mouse PVRL2 to cells OX PVRIG was relatively low compared to the binding of PVRIG to cells OX PVRL2. The reason for this could be the fact that commercial PVRL2 is available only as a monomer His-tagged protein and not as an Fc-fused protein (as for PVRIG). To this end, a custom Fc-fused mouse PVRL2 was produced at GenScript. However, from preliminary data, only a minor increase in binding was observed with this protein (˜5-fold compared to 2-3 fold with the PVRL2-his). Therefore, some other factors might influence this relatively low binding.

[0564] Due to the low PVRL2 binding to cells OX PVRIG, it was decided to establish an anti-PVRIG antibody blocking assay using PVRIG-Fc binding to cells OX PVRL2. According to the observed dose response curves we suggested three working concentrations: 0.1, 0.2 and 0.4 μg/ml. Following similar results obtained with binding of PVRIG to PVRL2 endogenously expressing B16-F10 cells, we suggested to perform the antibody blocking assay also on these cells at the following concentrations: 0.2, 0.4, 0.8 μg/ml.

[0565] PVRIG is a presumed receptor, therefore, preferably the antibody blocking assay should be performed with PVRL2 as a soluble protein and PVRIG expressed on the cells. Thus, it should be considered to examine anti-mouse PVRIG antibodies that demonstrate blocking activity in the current format also in this system.

### Additional Validation Study 3

[0566] The objective of this study is to confirm the binding partners of PVRIG, a novel immuno-oncology target. Preliminary studies indicate that one of these ligands is PVRL2. In this study, binding of the recombinant PVRIG protein to several potential ligands in the PVRIG axis has been investigated by ELISA.

### Protocols

[0567] List of reagents: Current literature on the PVRIG proteins suggests that there are three potential ligands: PVR (CD155), PVRL2 (CD112), and PVRL3 (CD113). To investigate their ability to bind the PVRIG receptor, these three ligands were sourced commercially, as follows: PVR and PVRL3 from Sino Biologicals Inc. and PVRL2 from R&D Systems and Sino Biologicals Inc. The human PVRIG recombinant protein was generated at Compugen as the PVRIG extra-cellular domain (ECD) fused to a human IgG1 Fc domain (PVRIG H:H).

[0568] ELISA to determine receptor-ligand interaction: Commercially sourced His-tagged ligands, PVR, PVRL2, and PVRL3, were coated on the wells of a high binding EIA/RIA plate (Costar 9018) overnight at 4° C. An irrelevant His-tagged protein was included as a negative control. Coated plate wells were rinsed twice with PBS and incubated with 300 μL blocking buffer (5% skim milk powder in PBS pH 7.4) at room temperature (RT) for 1 hr. Blocking buffer was removed and plates were rinsed twice more with PBS. Plate-bound ligands were incubated with varying concentrations of PVRIG H:H in solution (linear range of 0.1 μg/mL to 4 μg/mL in a 50 μL/well volume) at RT for 1 hr. Plates were washed three times with PBS-T (PBS 7.4, 0.05% Tween20), then three times with PBS and 504/well of a HRP-conjugated secondary antibody was added (Human IgG Fc domain specific, Jackson ImmunoResearch). This was incubated at RT for 1 hr and plates were washed again. ELISA signals were developed in all wells by adding 50 μL of Sureblue TMB substrate (KPL Inc) and incubating for 5-20 mins. The HRP reaction was stopped by adding 50 μL 2N H2504 (VWR) and absorbance signals at 450 nm were read on a SpectraMax (Molecular Devices) or EnVision (PerkinElmer) spectrophotometer. The data were exported to Excel (Microsoft) and plotted in GraphPad Prism (GraphPad Software, Inc.).

[0569] Results:

[0570] PVRIG preferably binds to PVRL2: The human PVRIG Fc-fusion protein was assayed for binding to PVR, PVRL2 and PVRL3, which were immobilized on an EIA/RIA plate. Varying concentrations of the receptor PVRIG in solution phase were incubated with the immobilized ligand. The data clearly show dose-dependent binding of PVRIG H:H to PVRL2, but no binding to ligands PVR, PVRL3 or the negative control protein (data not shown). The ELISA A450 signal was plotted as a function of the receptor concentration using a one-site binding equation, revealing an equilibrium binding constant (KD) of 13±1 nM.

[0571] Summary and Conclusions:

[0572] PVRIG is a novel immuno-oncology target for which the biology is not fully understood. In an effort to shed more light on this biology, we examined its binding to several potential ligands. PVRL2 was clearly identified as the binding partner of PVRIG. Quantitative analysis suggests that this interaction is very strong, with a KD of 13±1 nM. Our results also suggest that human PVRIG either does not bind the human PVR and PVRL3, or the binding is too weak to detect by ELISA.

### Additional Validation Study 4:

[0573] In this example, PVRIG expression on PBMC cell subsets was evaluated pre and post allo-activation. Following allo-activation the expression of PVRIG was upregulated on CD4+ T cells as well as on CD8+ T cells and double negative gamma delta T cells. This upregulation was observed in PBMCs of one out of two donors tested (see FIGS. 52A-52B).

### Example 6 Surface Plasmon Resonance Studies of PVR, PVRL2, and PVRL3 Binding to PVRIG, DNAM, and TIGIT

### Materials and Methods

[0574] All experiments were performed using a ProteOn XPR 36 instrument at 22° C.

[0575] Step 1: A high density goat anti-human fc polyclonal antibody surface (Invitrogen H10500) was prepared over all six lanes of a GLC chip using a ProteOn XPR 36 biosensor. The activation step for the anti-human fc surface occurred in the horizontal flow direction while the immobilization step for the high density pAb occurred in the vertical flow direction. The blocking step occurred in both the vertical and horizontal positions so that the horizontal “interspots” could be used as reference surfaces. An average of ˜4400 RU of goat anti-human pAb was immobilized on each lane.

[0576] Step 2: For each cycle, three different lots of human PVRIG fusion protein (human fc, GenScript lots 451, 448, 125), human DNAM-1 fusion protein (human fc, R&D Systems), human TIGIT fusion protein (human fc, R&D Systems), and a control human IgG (Synagis) were each captured over a different vertical lane for two minutes at a concentration of 2 μg/mL. PVR, two lots of PVRL2, and PVRL3 were each injected in the horizontal flow direction at six different concentrations over all six captured ligands at different ligand capture cycles. The injections were two minutes followed by 10 minutes of dissociation at a flow rate of 504/min. The PVR concentration range was 1.4 nM-332 nM in a 3-fold dilution series, both lots of PVRL2 were injected at a concentration range of 1.3 nM-322 nM in a 3-fold dilution series, and PVRL3 was injected at a concentration range of 1.4 nM-334 nM in a 3-fold dilution series. All protein reagents were prepared in running buffer which was degassed PBS buffer with 0.05% Tween 20 and 0.01% BSA added. The anti-human fc capture surfaces were regenerated with two 30-second pulses of 146 mM phosphoric acid after each cycle.

[0577] Step 3: Sensorgram data of the analytes binding to each captured ligand were processed and double-referenced using ProteOn Manager version 3.1.0.6 making use of interspot referencing and a pre-blank injection identical to the analyte injections.

### Results

[0578] a) PVR: Binds weakly to captured DNAM-1 and TIGIT and shows no binding to all three lots of PVRIG and the control IgG. Not enough information was generated to estimate the K_{D} of the PVR interactions with DNAM-1 and TIGIT (data not shown).

[0579] b) PVRL2: Both lots of PVRL2 showed binding to all three lots of PVRIG and to DNAM-1 but minimal or no binding to TIGIT and no binding to the control IgG. Sensorgrams showed complex kinetics, therefore binding constants could not be estimated (data not shown).

[0580] c) PVRL3: Showed minimal binding to TIGIT and did not bind the other proteins (data not shown).

### Example 7: In-Vitro Immunomodulatory Activities of PVRIG ECD-Ig on Mouse T Cells

[0581] In these experiments the immunomodulatory activities of the recombinant fused protein PVRIG-ECD-Ig was investigated on mouse T cell activation. The effect of PVRIG-ECD-Ig on activation of mouse CD4 T cells was investigated using a number of in-vitro T cell activation readouts: cell activation markers, cytokine secretion and proliferation.

[0582] In order to evaluate the activity of pvrig protein on t cell activation, recombinant protein was produced comprising the mouse extracellular domain (ECD) of the mouse PVRIG fused to the Fc of mouse IgG2a (designated PVRIG-ECD Ig M:M). The effect of the fc fused protein co-immobilized with anti-cd3 on mouse cd4 t cell functions, as manifested by activation markers and cytokines secretion was investigated.

### Materials and Methods

[0583] Fc fusion protein and control Ig: Fc fusion protein, PVRIG-ECD-Ig (batch #198) was tested. Mouse IgG2a (clone MOPC-173; Biolegend or C1.18.4; BioXcell) was used as isotype control.

[0584] Mouse CD4 T Cells Isolation:

[0585] Untouched CD4+CD25− T cells were isolated from pools of spleens of BALB/C mice using a T cell isolation Kit (Miltenyi Cat#130-093-227) according to the manufacturer's instructions. The purity obtained was >90%.

[0586] Activation of Mouse CD4 T Cells:

[0587] Anti-mouse CD3-c mAb (clone 145-2C11; BD Biosciences) at 2 μg/ml together with PVRIG-ECD-Ig protein or control Ig at various concentrations (1, 3 or 10 μg/ml), were co-immobilized for 3 hr at 37° C., on 96-well flat bottom tissue culture plates (Sigma, Cat. # Z707910). Control Ig was added to each well in order to complete a total protein concentration of 12 μg/ml per well. Wells were washed 3 times with PBS and plated with 1×10⁵ purified CD4+CD25− T cells per well and kept in a humidified, 5% CO2, 37° C. incubator. In some experiments, soluble anti-CD28 (clone: 37.51; eBioscience; 1 μg/ml) was added. Culture supernatants were collected at the indicated times post stimulation and analyzed for mouse IFNγ or IL-2 secretion by ELISA kits (R&D Systems). The effect of PVRIG-ECD-Ig protein (see FIGS. 103A-103BX) on the expression of the activation marker CD69 on mouse CD4+ T cells was analyzed by flow cytometry. Cells were stained 48 h post stimulation with a cocktail of antibodies including PerCP-anti-CD4 (clone G41.5; Biolegend), FITC or PE-anti-CD69 (clone H1.2F3; Biolegend), in the presence of anti-CD16/32 (clone 2.4g2; BD Biosciences) for blocking of Fcγ-receptors. Cells were evaluated using MACSQuant analyzer 9 (Miltenyi) and data analyzed using BD CellQuest or by MACSQuantify™ Software. Data was analyzed using Excel or Prism4 software.

### Results and Summary

[0588] Effect of PVRIG-ECD Ig M:M (See FIGS. 103A-103BX) on Mouse CD4+ T Cells function:

[0589] FIGS. 15A-15E show in-vitro immunomodulatory activities of PVRIG-ECD-Ig (see FIGS. 103A-103BX) on isolated mouse splenic T cells (CD4+, >95% purity) stimulated with microplates co-immobilized with anti-CD3 (2 μg/ml) alone or co-immobilized with control Ig (mIgG2a) or PVRIG-ECD-Ig (see FIGS. 103A-103BX)) (10 μg/ml) in the presence of soluble anti-CD28 (1 μg/ml). PVRIG-ECD-Ig (see FIGS. 103A-103BX) suppressed mouse CD4 T cell activation in a dose dependent manner, as manifested by reduced CD69 up-regulation (FIG. 15A, D), and reduction in TCR-induced cytokines (IL-2 and IFNγ) secretion (FIG. 15B-C, E). The magnitude of the inhibitory effect of PVRIG-ECD-Ig (see FIGS. 103A-103BX) was in the range of 30-100%. Inhibitory effect of PVRIG-ECD-Ig (see FIGS. 103A-103BX) on IFNγ secretion was observed in concentrations as low as 3 μg/ml (˜60% inhibition vs. control Ig).

[0590] PVRIG-ECD-Ig (see FIGS. 103A-103BX) inhibits T cell activation in a concentration-dependent manner when the Fc fusion protein is co-immobilized with anti-CD3 on plates. Maximal inhibitory effect was observed at 10 μg/ml of PVRIG-ECD-Ig (see FIGS. 103A-103BX).

[0591] The results demonstrate the inhibitory effect of PVRIG-ECD-Ig on mouse T cells activation, manifested by reduced cytokine secretion, and suppression of activation marker CD69 upregulation. This inhibition of T cell activation, supports the therapeutic potential of immunoinhibitory PVRIG proteins (PVRIG polypeptides and fusion proteins) according to the present invention in treating T cell-driven autoimmune diseases, such as rheumatoid arthritis, multiple sclerosis, psoriasis and inflammatory bowel disease, as well as for other immune related diseases and/or for reducing the undesirable immune activation that follows gene therapy. In addition, these results also support the therapeutic potential of immunostimulatory PVRIG proteins (PVRIG polypeptides and fusion proteins) that reduce the inhibitory activity of PVRIG for treating conditions which should benefit from enhanced immune responses, in particular enhanced CTL immunity and proinflammatory cytokines such as cancer, infectious diseases, particularly chronic infections and sepsis wherein T cell-mediated depletion of diseased cells is therapeutically advantageous.

### Example 8: In-Vitro Immunomodulatory Activities of PVRIG on Human Cytotoxic T Cells (CTLs)

[0592] The experiments described in this example evaluated the effect of ectopic expression of human PVRIG on different melanoma cell lines on their ability to activate CTLs (cytotoxic T lymphocytes) and serve as targets for killing by these cells.

### Materials & Methods:

[0593] Three human melanoma cell lines which present the MART-1 antigen in HLA-A2 context (SK-MEL-23, Mel-624 and Mel-624.38) were used as targets for CTLs. Mel-888 which does not express HLA-A2, served as a negative control.

[0594] Ectopic Expression of Human PVRIG on Cytotoxic T Lymphocytes (CTLs):

[0595] In order to express human PVRIG in peripheral blood leukocyte (PBL) cultures, the cDNA encoding for PVRIG was amplified using specific primers and cloned into an MSCV-based retroviral vector (pMSGV1) or in tripartite vectors: the CD8-dependent F4 TCR α- and β-chains were linked with a P2A sequence and cloned into pMSGV1 vector, either followed by an internal ribosome entry site (IRES) and PVRIG. The retroviral vector encoding for NGFR1, as negative control or in tripartite vectors: the CD8-dependent F4 TCR α- and β-chains were linked with a P2A sequence and cloned into pMSGV1 vector, either followed by an internal ribosome entry site (IRES) and NGFR. Verification of the cloning was done first using restriction enzyme digestion and subsequently by sequencing. Upon sequence confirmation, large amounts of the retroviral vector (Maxi-prep) were produced for subsequent use.

[0596] Peripheral blood leukocytes of healthy human donors were transduced with the retroviral constructs encoding PVRIG or with the retroviral vectors encoding for NGFR1 or an empty vector, as negative control. Transduction was carried out using a retronectin-based protocol; briefly, retroviral supernatant was produced in 293GP cells (a retroviral packaging cell line) following transfection with the retroviral vector and an amphotropic envelop gene (VSV-G). The retroviral supernatant was plated on retronectin-coated plates prior to the transduction to enable the binding of virions to the plate, and the PBLs were added to the plate for 6 hours. After that, the cells were replenished in a new culture vessel. Transduction efficiency and expression of the protein was determined by staining the transduced PBLs with commercial PVRIG specific rabbit polyclonal antibody or with commercial anti-NGFR (Cat. No 345108; BioLegend). Rabbit IgG (Sigma Cat. No. 15006) was used as isotype control, and as secondary antibody we used APC-conjugated anti-rabbit IgG (Jackson, Cat. No. 711-136-152).

[0597] Ectopic Expression of the F4 T Cell Receptor on Cytotoxic T Lymphocytes (CTLs):

[0598] In order to obtain effector lymphocytes that express the MART-1-specific F4 TCR, specifically recognizing MART-126-35-/HLA-A2 peptide-MHC complex, freshly isolated human PBLs previously transduced to express either with PVRIG, NGFR or an empty vector were stimulated with PHA and cultured for 5-10 days, and subsequently transduced with in vitro-transcribed mRNA encoding both α and β chains from the MART-1-specific F4 TCR. The transduced lymphocytes were cultured in lymphocyte medium (Bio target medium, fetal bovine serum (10%), L Glutamine Penicillin/Streptomycin (100 units/ml), IL-2 300 IU), replenished every 2-3 days. F4 TCR expression levels were verified by FACS staining using a specific monoclonal antibody that recognizes the extra-cellular domain of the beta-chain from the transduced specific TCR. (TCR-Vb12-PE, (Cat. No IM2291; Beckman Coulter).

[0599] Cytokine Secretion from PVRIG, NGFR or an Empty Vector and F4-TCR Transduced Lymphocytes Upon Co-Culture with Melanoma Cells:

[0600] PBLs expressing PVRIG or NGFR along with F4-TCR were co-cultured with un-manipulated melanoma cells. 10⁵ transduced PBLs were co-cultured with 10⁵ melanoma target cells for 16 hours. In order to assess the response of the effector CD8 T cells to the different tumor cell lines, cytokine secretion (IFNγ, IL-2 and TNF-α) was measured by ELISA in culture supernatants (IFNγ (Cat. No DY285E), IL-2 (Cat. No DY202E), TNF-α (Cat. No DY210E) R&D SYSTEMS), diluted to be in the linear range of the ELISA assay.

[0601] Cell Mediated Cytotoxicity Assay:

[0602] This assay was performed in order to assess target cell killing upon co-culture. PVRIG and F4 were expressed in PBLs using a bi-cystronic vector and co-cultured with CFSE labeled melanoma Target cells (labeled with 2 mM CFSE (eBioscience) for 6 min), at 37° C. for 18 hr, at E:T ratio of 3:1. Cells were collected after 18 hr and 1 mM propidium iodide (Sigma-Aldrich) was added for assigning the ratio of cell death. Samples were run on a CyAn-ADP flow cytometer (Beckman Coulter).

### Results:

[0603] General Design of the Experimental System:

[0604] In the experimental system described herein, PVRIG is over expressed on human PBLs which are next manipulated to express the MART1-specific and HLA-A2 restricted F4 TCR. Over expressing cells are then co-cultured with HLA-A2 positive (name them) and HLA-A2 negative (names) melanoma cell lines (reference). The F4 TCR was recently used in clinical trials in terminally-ill melanoma patients to specifically confer tumor recognition by autologous lymphocytes from peripheral blood by using a retrovirus encoding the TCR (Morgan et al, 2006 Science, 314:126-129). The effect of PVRIG expression on antigen-specific activation of CD8 T cells by co-culture with cognate melanoma cells was assessed by cytokine secretion.

[0605] Over Expression of PVRIG on Human PBLs—Experiment 1:

[0606] Human PBLs were transduced with a retroviral vector encoding the PVRIG or an empty vector as negative control, as described in Materials & Methods. The levels of PVRIG were assessed by flow cytometry at 48 hrs after transduction, and compared to cells transduced with an empty vector. The percentage of the transgene-expressing cells was 62.4% as shown in FIG. 16.

[0607] Over Expression of PVRIG on Human PBLs—Experiment 2:

[0608] Human PBLs were transduced with a retroviral vector encoding the PVRIG or NGFR or an empty vector as negative controls, as described in Materials & Methods. The levels of PVRIG were assessed by flow cytometry at 48 hrs after transduction, and compared to cells transduced with an empty vector. The percentage of the PVRIG-expressing cells was in the range of 20%. The expression of NGFR was of 63% as shown in FIG. 17. A few additional attempts to over express PVRIG on PBLs were un-successful. One possibility is that the difficulty in expressing PVRIG in primary PBLs stems from a basal endogenous expression level in these cells.

[0609] Over Expression of F4 TCR on Human PBLs:

[0610] To perform functional assays with human CTLs, we used PBLs engineered to express the F4 TCR, which recognizes HLA-A2+/MART1+ melanoma cells, as described in Materials & Methods. FIG. 18A shows levels of F4 TCR expression obtained upon TCR transduction of leukocytes used in experiment 1, FIG. 18B shows levels of F4 TCR expression obtained upon TCR transduction of leukocytes used in experiment 2.

[0611] Effect of PVRIG Expression on IFNγ Secretion—Experiment 1:

[0612] PVRIG or Empty-vector and F4-transduced PBLs were co-cultured with melanoma cell lines. The levels of IFNγ secretion were measured at 16-hours of co-culture. As shown in FIG. 19, the magnitude of inhibition of IFNγ secretion due to PVRIG over-expression was more than 90%. Co-culture with the HLA-A2 negative cell line Mel-888 which served as a negative control, caused only a minor activation dependent IFNγ secretion from F4-transduced lymphocytes. PBLs not expressing the F4 TCR (designated W/O) serve as an additional negative control.

[0613] Effect of PVRIG Expression on IFNγ Secretion—Experiment 2:

[0614] PVRIG, NGFR or Empty-vector and F4 were transduced into PBLs in co-transduction (FIG. 20A) or using a bi-cystronic vector (FIG. 20B). Transduced PBLs were co-cultured with melanoma cell lines. The levels of IFNγ secretion were measured at 16-hours of co-culture. As shown in FIG. 20A, the magnitude of inhibition of cytokine secretion due to PVRIG over-expression was in the range of 30%. Co-culture with the HLA-A2 negative cell line Mel-888 which served as a negative control, caused only a minor activation dependent IFNγ secretion from F4-transduced lymphocytes. PBLs not expressing the F4 TCR (designated W/O) serve as an additional negative control. As shown in FIG. 20B, when PVRIG is co-transduced with the F4 TCR, no inhibition of IFNγ was observed.

[0615] Effect of PVRIG on CTL Mediated Killing Activity—Experiment 2:

[0616] PVRIG or NGFR and F4 were transduced to PBLs using a bi-cystronic vector and co-cultured with CFSE labeled melanoma cell lines. As shown in FIG. 21, the percentage of propidium Iodide positive events (reflecting intensity of killing activity) was decreased by ˜50% by the expression of PVRIG relative to negative control NGFR transduced cells. Killing activity of PVRIG expressing cells is similar to that of co-culture between melanoma and PBLs not expressing the F4 TCR (designated W/O).

[0617] Summary:

[0618] Without wishing to be limited by a single hypothesis, the results presented herein indicate that overexpression on primary lymphocytes results in reduced cytokine secretion by CTLs, suggesting that PVRIG has an inhibitory effect on CTLs.

### Example 9: Human Anti-PVRIG Antibodies

[0619] The objective of this study was to isolate human antibodies that bind to the PVRIG immuno-oncology target with high affinity and specificity, and block the interaction of PVRIG with its binding partner, PVRL2. This was achieved by panning a human fab fragment phage display library against a recombinant protein comprising the human PVRIG extracellular domain (ECD) fused to the human IgG1 Fc region, and screening the resulting antibodies for their ability to block the PVRIG interaction with PVRL2.

### Protocols

[0620] Functional QC of Reagents:

[0621] The purity of the panning reagent, PVRIG ECD fused to human IgG1 Fc domain (PVRIG H:H), was determined by Microfluidics Capillary Electrophoresis using a LabChip System (PerkinElmer). Activity of the panning reagent was validated by its ability to bind its ligand PVRL2.

[0622] ELISA to Detect Protein-Protein Interaction:

[0623] His-tagged PVRL2 recombinant protein was diluted to 2 μg/mL in phosphate buffered saline (PBS) and 50 μL aliquots were coated on the wells of a high binding EIA/RIA plate (Costar) overnight at 4° C. Coated plate wells were rinsed twice with PBS and incubated with 300 μL blocking buffer (5% skim milk powder in PBS pH 7.4) at room temperature (RT) for 1 hr. Blocking buffer was removed and plates were rinsed twice more with PBS. Plate-bound PVRL2 was incubated with varying concentrations of PVRIG H:H in solution (linear range of 0.1 μg/mL to 4 μg/mL in a 50 μL/well volume) at RT for 1 hr. Plates were washed three times with PBS-T (PBS 7.4, 0.05% Tween20), then three times with PBS and 504/well of a HRP-conjugated secondary antibody was added (Human IgG Fc domain specific). This was incubated at RT for 1 hr and plates were washed again. ELISA signals were developed in all wells by adding 50 μL of Sureblue TMB substrate (KPL Inc) and incubating for 5-20 mins. The HRP reaction was stopped by adding 50 μL 2N H2504 (VWR) and absorbance signals at 450 nm were read on a SpectraMax (Molecular Devices) or EnVision (PerkinElmer) spectrophotometer.

[0624] Preparation of Biotinylated PVRIG:

[0625] To facilitate phage panning in solution using streptavidin-coated magnetic beads, PVRIG H:H and an irrelevant human IgG1 Fc isotype control were biotinylated using Lightning-Link® Biotin kit (Innova Biosciences). Biotinylation reactions were performed following the manufacturer's protocol and the biotinylated reagents were stored at 4° C. for further QC and biopanning. The purity and activity of the biotin-labeled proteins was assessed by LabChip and functional ELISA, as described in Section 2.1. In addition, the degree of biotinylation was assessed by ELISA using two approaches: 1) the biotinylated reagents were adsorbed on a high binding EIA/RIA plate and the proteins were detected using HRP-conjugated streptavidin, and 2) the biotinylated proteins were incubated on EIA/RIA plate pre-coated with streptavidin and the binding was detected using a HRP-conjugated human IgG Fc domain specific secondary antibody.

[0626] Phage Panning of Human Antibody Library:

[0627] Panning reactions were carried out in solution using streptavidin-coated magnetic beads to capture the biotinylated antigens. Note that all washing and elution steps were conducted using a magnetic rack to capture the beads (Promega). All incubation steps were conducted at room temperature with gentle mixing on a tube rotator (BioExpress). Four panning sub-campaigns were conducted, each with a different combination of antigen concentrations, washes and Fc-binder depletion steps (Table 1).

[0628] All the panning sub-campaigns were carried out using the biotinylated PVRIG H:H antigen. For each round of panning, the phage libraries were depleted against 100 pmol of an irrelevant human IgG1 Fc protein in two successive steps. Following depletion, sub-campaigns A and B involved panning against 50 nM of the antigen in each round, under low and high stringency wash conditions, respectively. Sub-campaigns C and D were identical to sub-campaign B, except that in campaign C the library was blocked with 10-fold excess of the irrelevant IgG1 Fc protein in panning rounds 2 and 3. Sub-campaign D differed in that 5 nM antigen was used in round 3.

TABLE 1
Antigen and washing conditions used
for phage panning against PVRIG H:H.

| Sub- | | Antigen | | |
|---|---|---|---|---|
| campaign | Round | Concentration | Washes | Fc Depletion |
| A | 1 | 50 nM | 3x PBS-T + 3x | 2X 100 pmol |
| | | | PBS | |
| | 2 | 50 nM | 3x PBS-T + 3x | 2X 100 pmol |
| | | | PBS | |
| | 3 | 50 nM | 3x PBS-T + 3x | 2X 100 pmol |
| | | | PBS | |
| B | 1 | 50 nM | 3x PBS-T + 3x | 2X 100 pmol |
| | | | PBS | |
| | 2 | 50 nM | 6x PBS-T + 6x | 2X 100 pmol |
| | | | PBS | |
| | 3 | 50 nM | 6x PBS-T + 6x | 2X 100 pmol |
| | | | PBS | |
| C | 1 | 50 nM | 3x PBS-T + 3x | 2X 100 pmol |
| | | | PBS | |
| | 2 | 50 nM | 6x PBS-T + 6x | 2X 100 pmol + |
| | | | PBS | block with 1 nmol |
| | 3 | 50 nM | 6x PBS-T + 6x | 2X 100 pmol |
| | | | PBS | block with 1 nmol |
| D | 1 | 50 nM | 3x PBS-T + 3x | 2X 100 pmol |
| | | | PBS | |
| | 2 | 50 nM | 6x PBS-T + 6x | 2X 100 pmol |
| | | | PBS | |
| | 3 | 5 nM | 6x PBS-T + 6x | 2X 100 pmol |
| | | | PBS | |

[0629] Preparation of phage library for panning: All phage panning experiments used the XOMA031 human fab antibody phage display library (XOMA Corporation, Berkeley, Calif.). Sufficient phage for a 50-fold over-representation of the library were blocked by mixing 1:1 with 10% skim milk powder in PBS (final skim milk concentration 5%) and incubating for 1 hr.

[0630] Antigen coupling to streptavidin beads: For each sub-campaign, three 100 μL aliquots of Dynal streptavidin-coated magnetic beads (Life Technologies) were blocked by suspension in 1 mL of blocking buffer (5% skim milk powder in PBS) and incubated for 30 mins. One blocked bead aliquot was mixed with 100 pmols of biotinylated PVRIG H:H. The other two aliquots were mixed with 100 pmols of the irrelevant antigen for depletion of Fc-only binders. Biotin-labeled antigens were coupled to the beads for 30 mins at RT. Bead suspensions were washed twice with PBS to remove free antigen and re-suspended in 100 μL blocking buffer.

[0631] 2.4.2. Depletion of human IgG1 Fc and streptavidin bead binders from the phage library: It was necessary to remove unwanted binders to streptavidin beads and the Fc region of PVRIG H:H before phage panning could commence. To achieve this, blocked phage was mixed with one 100 μL aliquot of uncoupled streptavidin beads and incubated for 45 mins. The beads (and presumably unwanted bead and human IgG1 Fc-binders) were discarded. This step was repeated once and depleted phage library supernatants were reserved for panning.

[0632] 2.5. Phage panning round 1: The blocked and depleted phage library was mixed with biotinylated PVRIG H:H coupled to magnetic beads described above. This suspension was incubated for 1 hr at RT with gentle rotation to allow binding of PVRIG H:H specific phage. Non-specific binders were removed by washing according to the protocol in Table 1. After washing, bound phage were eluted by incubation with 500 μL of 100 mM triethylamine (TEA) (EMD) for 15 mins at RT. The eluate was neutralized by adding 500 μL of 1 M Tris-HCl pH 8.0 (Teknova).

[0633] 2.5.1. Determination of phage titer: 10 μL of the initial phage library (input titer) or panning eluate (output titer) was serially diluted (10-fold) in PBS. A 90 μL aliquot of each phage dilution was mixed with 500 μL of TG1 E. coli cells grown to an optical density of ˜0.5 at 600 nm (OD 600 nm). Phage were allowed to infect the cells by stationary incubation for 30 mins, then shaking incubation (250 rpm) for 30 mins, all at 37° C. A 10 μL aliquot of each infected cell culture was spotted on a 2YT agar plate supplemented with 2% glucose and 100 μg/mL carbenicillin (2YTCG, Teknova). Plates were incubated overnight at 30° C. Colonies growing from each 10 μL spot were counted and used to calculate input and output titers.

[0634] 2.5.2. Phage rescue: The remaining phage eluate (˜1 mL) was mixed with 10 mL of TG1 E. coli cells grown to an OD 600 nm of 0.5. Phage were infected into cells as detailed in section 2.5.1. Infected cells were pelleted by centrifugation at 2500×G, re-suspended in 750 μL 2YT medium (Teknova) and spread on 2YTCG agar plates. These were incubated overnight at 37° C. and the resulting E. coli lawns were scraped and re-suspended in ˜20 mL liquid 2YTCG (Teknova). A small aliquot of re-suspended cells was inoculated into 50 mL 2YTCG to achieve an OD 600 nm of 0.05, and then grown at 37° C. with 250 rpm shaking until the OD reached 0.5. The resulting culture was infected with M13K07 helper phage (New England Biolabs) and incubated overnight at 25° C. with shaking to allow phage packaging. The culture supernatant containing rescued phage particles was cleared by centrifugation at 2500×G and 1 mL was carried over for either a) a subsequent round of panning or b) fab binding screens.

[0635] Phage panning rounds 2-3: Second and third rounds of panning were conducted as per the steps above, except that the rescued phage supernatant from the previous round was used in place of the phage library. The washing conditions, depletion and the antigen concentrations used are listed in Table 1.

[0636] Binding Screens Using Fabs Prepared from Periplasmic Extracts

[0637] Fab Expression Vectors:

[0638] The XOMA031 library is based on phagemid constructs that also function as fab expression vectors. These vectors contain fab heavy chain and light chain expression cassettes, a lac promoter to drive expression of the antibody genes, and an ampicillin resistance gene. The antibody chains are appended with N-terminal signal peptides to drive their secretion into the periplasmic space. The C-terminal of the heavy chain carries a truncated gene III protein sequence for incorporation into phage particles. The heavy chain also carries hexa-histidine (SEQ ID NO:1556), c-myc and V5 affinity tags. Transformation of these vectors into E. coli and induction with isopropyl β-D-1-thiogalactopyranoside (IPTG) results in periplasmic expression of soluble fab molecules.

[0639] Fab PPE production: Eluted phage pools from panning round 3 were diluted and infected into TG1 E. coli cells (Lucigen) so that single colonies were generated when spread on a 2YTCG agar plate. This resulted in each colony carrying single fab clone. Individual clones were inoculated into 1 mL 2YTCG starter cultures in 96-well deep well blocks (VWR) using a Qpix2 instrument (Molecular Devices). These starter cultures were grown overnight in a Multitron 3 mm incubator (Infors) at 37° C. with 700 rpm shaking. For fab expression, 20 μL of 1 mL starter cultures were transferred into a second set of deep well plates containing 1 mL 2YT with 0.1% glucose and 100 μg/mL ampicillin. Cultures were grown until the average OD 600 nm was 0.5-1.0 and protein expression was induced by adding IPTG (Teknova) to a final concentration of 1 mM. Expression cultures were incubated overnight in the Multitron instrument at 25° C. with 700 rpm shaking.

[0640] Fab proteins secreted into the E. coli periplasm were extracted for analysis. Cells were harvested by centrifugation at 2500×G, the supernatants were discarded and pellets were re-suspended in 75 μL ice-cold PPB buffer (Teknova). Extracts were incubated for 10 mins at 4° C. with 1000 rpm shaking, and 225 μL ice-cold ddH2O was added and incubated for a further 1 hr. The resulting periplasmic extract (PPE) was cleared by centrifugation at 2500×G and transferred to separate plates or tubes for ELISA and FACS analysis. All extraction buffers contained EDTA-free Complete Protease Inhibitors (Roche).

[0641] Each plate of samples also included duplicate “blank PPE” wells to serve as negative controls. These were created by intentionally leaving two 1 mL cultures un-inoculated and then processing them in the same way as the fab PPEs, thereby creating a sample with no bacterial growth and therefore no fab expression.

[0642] Primary Screen by ELISA:

[0643] Two 96-well plates of PPE extracts per sub-campaign were tested for binding to PVRIG H:H by ELISA. Note that a non-biotinylated version of the protein was used for the ELISA screen to avoid the selection of biotin or streptavidin-binders. PVRIG H:H recombinant protein was diluted to 2 μg/mL in phosphate buffered saline (PBS) and 50 μL aliquots were coated on the wells of a high binding EIA/RIA plate (Costar) overnight at 4° C. Coated plate wells were rinsed twice with PBS and incubated with 300 μL blocking buffer (5% skim milk powder in PBS pH 7.4) at room temperature (RT) for 1 hr. Blocking buffer was removed and plates were rinsed twice more with PBS. Plate-bound PVRIG was incubated with the PPEs, pre-blocked with 3% skim milk, at RT for 1 hr. Plates were washed three times with PBS-T (PBS 7.4, 0.05% Tween20), then three times with PBS and 504/well HRP-conjugated, anti-human Fab secondary antibody (Jackson ImmunoResearch) was added at a 1:2000 dilution in 5% milk in PBS. This was incubated at RT for 1 hr and plates were washed again. ELISA signals were developed in all wells by adding 50 μL of Sureblue TMB substrate (KPL Inc) and incubating for 5-20 mins. The HRP reaction was stopped by adding 50 μL 2N H2SO4 (VWR) and absorbance signals at 450 nm were read on a SpectraMax (Molecular Devices) or EnVision (PerkinElmer) spectrophotometer. Wells that showed signal over background (blank PPE) ratio>3 were selected as positive hits.

[0644] Sequence Analysis of ELISA Positive Fabs:

[0645] The positive hits from the ELISA screen were selected and re-arrayed into a new 96-well plate. The clones were grown overnight at 37° C. and the plasmid DNA was sequenced using heavy chain and light chain-specific primers. The sequences were assembled and analyzed using Xabtracker (XOMA) software. The clones were deemed sequence-unique if there were more than one non-conservative differences in the heavy chain CDR3. Clones with same or similar heavy chain but significantly different light chains were labeled as siblings of the original clone.

[0646] FACS Screening of Fabs as PPEs:

[0647] The sequence-unique ELISA-positive fab clones were selected and analyzed for their ability to bind PVRIG over-expressing cells by fluorescence-activated cell sorting (FACS). Analyses were conducted using HEK293 cells over-expressing the human PVRIG antigen. In a parallel experiment, un-transfected HEK293 cells were used as a negative control for each fab sample.

[0648] The PPEs for the sequence-unique ELISA-positive fab clones were generated as described above. All the assays were conducted using FACS buffer (1% BSA and 0.1% sodium azide in PBS). The human PVRIG and un-transfected HEK293 cells were harvested, washed twice and re-suspended at a density of 2×10⁶ cells/ml. A 25 μl aliquot of cells was mixed with 25 μl of each PPE sample and incubated for 1 hr at 4° C. with gentle shaking. Two blank PPE controls were also included in the analysis. Plates were washed one time in 200 μl of FACS buffer and 50 μL of a 2 μg/mL dilution of a mouse anti-C-myc antibody (Roche) was added to each well. After incubation for 30 mins at 4° C., cells were washed again and 25 μl of a 5 μg/mL dilution of goat anti mouse fab-AF647 (Jackson Immunoresearch) was added to each PPE and negative control well. All secondary antibodies were incubated for 30 min at 4° C. After two washes, cells were re-suspended in a final volume of 50 μl of fixation buffer (2% paraformaldehyde in FACS buffer). Samples were read on an Intellicyt HTFC screening system, recording approximately 5000 events per well in a designated live gate. Data was analyzed using FlowJo (De Novo Software, CA, USA) and exported to Excel. Ratio of Mean Fluorescence Intensity (MFI) for the human PVRIG over-expressing HEK cells and the un-transfected 293 cells was calculated using Xabtracker software (XOMA). Positive hits on each plate were identified as those giving an MFI ratio 5-fold greater than the averaged blank PPE control signal.

[0649] Re-Formatting of Fab Hits and Production as Human IgG Molecules:

[0650] Potential PVRIG binding fabs were converted to full length human IgGs for further characterization. Protein expression constructs were derived by PCR-amplification of variable heavy, lambda and kappa domain genes, which were sub-cloned into pFUSE-CHIg-hG1 (human IgG1 heavy chain), pFUSE2-CLIg-hK (human kappa light chain) or pFUSE2-CLIg-hL2 (human lambda 2 light chain) vectors, respectively (all expression vectors were sourced from Invivogen).

[0651] Expi293 cells (Life Technologies) were seeded at 6×10⁵ cells/ml in Expi293 medium (Life Technologies) and incubated for 72 hrs at 37° C. in a humidified atmosphere of 8% CO2 with shaking at 125 rpm. This cell stock was used to seed expression cultures at 2.0×10⁶ cells/ml in Expi293 medium. These cultures were incubated as above for 24 hrs with shaking at 135 rpm.

[0652] For transfection, cells were diluted again to 2.5×10⁶ cells/ml in Expi293 medium. The protein expression constructs for antibody heavy chain and light chain were mixed at a ratio of 1:2. For every 30 mL of expression culture volume, 30 μg of DNA and 81 μL of Expifectamine (Life Technologies) were each diluted separately to 1.5 mL with Opti-MEM (Life Technologies) and incubated for five minutes. Diluted DNA and Expifectamine were then mixed and incubated at RT for 20 mins. This was then added to the expression culture in a shaker flask and incubated as described above, with shaking at 125 rpm.

[0653] Approximately 20 hrs post-transfection, 150 μL of ExpiFectamine 293 transfection Enhancer 1 and 1.5 mL of ExpiFectamine 293 Transfection Enhancer 2 was added to each flask. Cultures were incubated for a further five days (six days post-transfection in total) and supernatants were harvested by centrifugation. IgGs were purified from the supernatants using an AKTA Pure FPLC (GE Healthcare Bio-Sciences) and HiTrap MabSelect Sure affinity columns (GE Healthcare Bio-Sciences) according to manufacturer's instructions.

[0654] FACS Screening of Reformatted IgG1 Antibodies:

[0655] FACS screening of the reformatted antibodies was done similarly to the PPE based screen described herein, except that a dose-dependent titration of the purified antibodies was performed. The human PVRIG over-expressing HEK293 cells, or the un-transfected HEK293 cells, were incubated with varying concentrations (0-10 μg/ml) of the anti PVRIG antibodies or isotype controls in FACS buffer at 4° C. for 60 mins. Cells were washed once in FACS buffer, re-suspended in 50 μl of Alexa Fluor 647 conjugated anti-human IgG (Fab fragment specific) diluted 1:200 and incubated for 30 mins at 4° C. in the dark. Cells were washed twice and re-suspended in a final volume of 80 μl of FACS buffer and Propidium Iodide (Biolegend cat#421301) diluted 1:1000. Samples were analyzed using an Intellicyt HTFC screening system (Intellicyt). Data was analyzed using FlowJo (DeNovo), exported to Excel (Microsoft) and plotted in GraphPad Prism (GraphPad Software, Inc.).

### Results

[0656] Functional QC of the PVRIG H:

[0657] H recombinant protein: The purity of the PVRIG H:H protein was assessed by microfluidics capillary electrophoresis using a LabChip system. Under reducing conditions, the recombinant protein migrated at 80 kDa, consistent with its calculated molecular weight of 80.4 kDa, and showed 99% purity (data not shown). Under non-reducing conditions, one additional peak was observed which likely resulted from the presence of a dimeric form of the protein due to Fc-Fc interaction.

[0658] The functional integrity of the recombinant protein was assessed by evaluating its binding to PVRL2 (a known ligand for PVRIG) in ELISA. A dose-dependent response was observed for the binding of PVRIG H:H to PVRL2 (data not shown). In comparison, no binding was observed for a irrelevant human IgG1 Fc control. Taken together, this indicated that the PVRIG H:H recombinant protein is of high purity and is functionally active, and thus is suitable for biopanning.

[0659] QC of the Biotinylated PVRIG H:

[0660] H recombinant protein: The purity of the biotinylated PVRIG H:H protein was assessed by microfluidics capillary electrophoresis using LabChip system. No significant differences were observed between the non-biotinylated and the biotinylated recombinant proteins (data not shown). Note that an additional 44.3 kDa peak observed in the biotinylated protein sample. This peak may result from the monomeric form of the PVRIG H:H protein or maybe an artifact of the quenching reaction of the biotinylation kit.

[0661] Successful biotinylation was confirmed by incubating the biotinylated protein on a streptavidin-coated EIA plate and detecting the bound protein using a HRP-conjugated anti human IgG1 Fc secondary antibody. The binding of biotinylated PVRIG H:H to the streptavidin-coated EIA plate was comparable to a commercially sourced irrelevant biotinylated protein (data not shown).

[0662] Phage Panning:

[0663] The biotinylated PVRIG H:H protein was used for phage panning against the XOMA031 human fab antibody phage display library (XOMA Corporation, Berkeley, Calif.). Three rounds of biopannings were performed, under 4 different combinations of washing stringency, antigen concentration, and depletion of Fc binders (sub-campaigns A-D). The success of each round was estimated using the phage output titers. Qualitative guidelines were used to define the success of the panning sub-campaigns, such as significant reduction in phage titers after round 1, increase or maintenance of phage titers after rounds 2 and 3, and decrease in phage titers upon increasing wash stringency or decreasing antigen concentration. All 4 sub-campaigns resulted in phage titers in the expected range that were consistent among the sub-campaigns (data not shown).

[0664] Screening of Phage Output as Fab PPEs:

[0665] Two 96-well plates of fab clones (as PPEs) for each of the four sub-campaigns were screened to evaluate the success of biopanning. The results are summarized in table 3 and are discussed in further detail below. Overall, all 4 sub-campaigns yielded significant numbers of PVRIG H:H specific fabs. A total of 49 target-specific unique fabs were identified. The sub-campaigns B and D showed the highest ELISA hit rates and FACS correlation and were selected for an extended screen.

TABLE 3
Summary of pilot screen of fab PPEs. For each sub-campaign, the total
number of clones screened, ELISA hits, FACS hits and sequence
uniqueness are listed. Open reading frames (ORFs) represent the
clones that were successfully sequenced as a full-length fab.
Specificity is based on the lack of non-specific binding to irrelevant
proteins in ELISA. FACS correlation represents the percent of ELISA
hits that were also FACS positive (specifically bound to PVRIG
over-expressing HEK293 cells).

| | Sub A | Sub B | Sub C | Sub D | Overall |
|---|---|---|---|---|---|
| Clones | 182 | 182 | 182 | 182 | 728 |
| screened | | | | | |
| ELISA | 48 | 51 | 44 | 68 | 211 |
| positive | | | | | |
| (>3 S/N) | | | | | |
| ELISA Hit | 26% | 28% | 24% | 37% | 29% |
| rate | | | | | |
| ORFs | 36 (75%) | 45 (88%) | 35 (80%) | 63 (93%) | 179 (85%) |
| Unique | 25 | 21 | 17 | 31 | 73 |
| sequences | | | | | |
| Diversity | 69% | 47% | 49% | 49% | 41% |
| Specificity | 100% | 100% | 100% | 100% | 100% |
| by | | | | | |
| ELISA* | | | | | |
| FACS | 14 | 17 | 14 | 24 | 49** |
| Binders | | | | | |
| (>5 S/N) | | | | | |
| FACS | 56% | 81% | 82% | 77% | 67% |
| correlation | | | | | |

*No non-specific binding to irrelevant Fc conjugates or PVRL2;
**35 unique HCs, 14 siblings

[0666] Primary Fab Screen (ELISA):

[0667] Two 96-well plates (182 fab clones) of PPEs for each sub-campaign were screened by ELISA against the PVRIG H:H recombinant protein. Note that although biotinylated protein was used for panning, the non-biotinylated version was used for the ELISA screen, which avoided detection of biotin or streptavidin-specific binders. The 4 sub-campaigns resulted in ELISA hit rates ranging from 24-37% when the threshold for a ‘positive’ signal was set at a 3-fold ratio of target-specific binding: blank PPE control signal.

[0668] Secondary Screen (DNA Sequence Analysis, ELISA and FACS) Fabs:

[0669] The ELISA positive clones were sequenced to select non-redundant fabs. Seventy-three sequence-unique fab clones were identified. 19 clones were unique to sub-campaign A, 13 clones were unique to sub-campaign B, 10 clones were unique to sub-campaign C, 18 clones were unique to sub-campaign D, while the remaining 23 clones were shared between the campaigns. Sequence-unique, ELISA-positive fab clones were re-expressed as PPEs and screened for specific binding by FACS. A total of 49 out of 73 unique clones were identified as PVRIG specific ELISA and FACS binders (following the criteria established in 2.6.5). The 49 FACS binders corresponded to 35 antibodies with unique heavy chains and 14 siblings that have unique light chains but share the heavy chain with one of the unique clones. A summary of FACS binding data is presented in Table 4.

[0670] The sequence unique fabs were also tested for non-specific binding. All the fab PPEs analyzed bound to the PVRIG H:H recombinant protein with an assay signal greater than 3-fold over the blank PPE control. In a parallel assay, fab PPEs were tested for binding to two irrelevant proteins with the same IgG1 Fc region, as well as the PVRL2 recombinant protein. None of the clones showed significant non-specific binding to the controls, suggesting that the selected fabs are specific for PVRIG.

TABLE 4
FACS binding summary for PVRIG fabs. All unique ELISA positive fabs
were analyzed by FACS. The mean fluorescence intensity (MFI) was
measured for the PVRIG over-expressing HEK293 cells as well as the
un-transfected HEK293 cells. The MFI ratio for the target-specific vs
off-target binding was calculated. Clones with MFI ratio >5
were selected as hits and are listed below.

| fab clone | MFI ratio |
|---|---|
| CPA.7.001 | 11 |
| CPA.7.002 | 8.9 |
| CPA.7.003 | 9.5 |
| CPA.7.004 | 9.3 |
| CPA.7.005 | 6.5 |
| CPA.7.006 | 9.6 |
| CPA.7.007 | 14 |
| CPA.7.008 | 14 |
| CPA.7.009 | 10 |
| CPA.7.010 | 7.6 |
| CPA.7.011 | 10 |
| CPA.7.012 | 19 |
| CPA.7.013 | 12 |
| CPA.7.014 | 14 |
| CPA.7.015 | 15 |
| CPA.7.016 | 7.6 |
| CPA.7.017 | 13 |
| CPA.7.018 | 7.8 |
| CPA.7.019 | 16 |
| CPA.7.020 | 6.9 |
| CPA.7.021 | 15 |
| CPA.7.022 | 7.5 |
| CPA.7.023 | 12 |
| CPA.7.024 | 9.8 |
| CPA.7.025 | 6 |
| CPA.7.026 | 5.3 |
| CPA.7.027 | 9.2 |
| CPA.7.028 | 17 |
| CPA.7.029 | 6.7 |
| CPA.7.030 | 15 |
| CPA.7.031 | 8.5 |
| CPA.7.032 | 7.6 |
| CPA.7.033 | 22 |
| CPA.7.034 | 7.7 |
| CPA.7.035 | 14 |
| CPA.7.036 | 5 |
| CPA.7.037 | 5.3 |
| CPA.7.038 | 6.3 |
| CPA.7.039 | 12 |
| CPA.7.040 | 12 |
| CPA.7.041 | 7.6 |
| CPA.7.042 | 5.4 |
| CPA.7.043 | 13 |
| CPA.7.044 | 7.9 |
| CPA.7.045 | 7.8 |
| CPA.7.046 | 10 |
| CPA.7.047 | 8.4 |
| CPA.7.049 | 10 |
| CPA.7.050 | 22 |

[0671] Reformatting of the ELISA and FACS Positive Fabs into hIgG1:

[0672] All unique ELISA and FACS binders were reformatted for expression as human IgG1 molecules in Expi293 cells. Out of the original 49 antibodies, 44 were successfully expressed as full-length antibodies. These reformatted antibodies were tested for retained binding to PVRIG over-expressing HEK293 cells alongside an irrelevant human IgG1 isotype control. All antibodies were also tested against un-transfected HEK293 cells. The resulting binding results were used to demonstrate the specificity of the antibodies and also plotted to calculate the equilibrium binding constant (KD). Nine out of the remaining 44 antibodies showed weak binding or significant non-specific binding. The remaining 35 antibodies were selected for further analysis in cell-based functional assays. The FACS-based KD of these antibodies are listed in Table 6. The KD values range from 0.30 nM to 96 nM, with a median of 9.4 nM, suggesting that most antibodies obtained from the panning campaign are very specific and bind to PVRIG with high affinity.

TABLE 5
Expression and binding summary of reformatted antibodies. All unique
ELISA and FACS positive fabs were reformatted into the human IgG1
backbone. FACS KD values were determined by dose titration against
the PVRIG over-expressing HEK293 cells. Off-target binding was
determined by dose titration against the un-transfected HEK293 cells.

| Antibody | FACS KD (nM) |
|---|---|
| CPA.7.001 | No-expression |
| CPA.7.002 | 44.35 |
| CPA.7.003 | Non-specific binding |
| CPA.7.004 | 21.71 |
| CPA.7.005 | 95.56 |
| CPA.7.006 | No-expression |
| CPA.7.007 | 0.73 |
| CPA.7.008 | No-expression |
| CPA.7.009 | 33.00 |
| CPA.7.010 | 21.89 |
| CPA.7.011 | 66.02 |
| CPA.7.012 | 0.30 |
| CPA.7.013 | No-expression |
| CPA.7.014 | 2.04 |
| CPA.7.015 | 1.34 |
| CPA.7.016 | 22.02 |
| CPA.7.017 | 1.82 |
| CPA.7.018 | 9.29 |
| CPA.7.019 | 0.45 |
| CPA.7.020 | 86.97 |
| CPA.7.021 | 11.22 |
| CPA.7.022 | 4.17 |
| CPA.7.023 | 4.08 |
| CPA.7.024 | 9.08 |
| CPA.7.025 | Non-binder |
| CPA.7.026 | Non-binder |
| CPA.7.027 | Non-binder |
| CPA.7.028 | 7.14 |
| CPA.7.029 | Weak binding |
| CPA.7.030 | No-expression |
| CPA.7.031 | Non-binder |
| CPA.7.032 | 8.78 |
| CPA.7.033 | 12.8 |
| CPA.7.034 | 14.2 |
| CPA.7.035 | Non-binder |
| CPA.7.036 | 6.0 |
| CPA.7.037 | Non-specific binding |
| CPA.7.038 | 20.26 |
| CPA.7.039 | 3.76 |
| CPA.7.040 | 0.79 |
| CPA.7.041 | 52.2 |
| CPA.7.042 | 24.26 |
| CPA.7.043 | 13.2 |
| CPA.7.044 | 9.4 |
| CPA.7.045 | 3.73 |
| CPA.7.046 | Non-specific binding |
| CPA.7.047 | 5.36 |
| CPA.7.049 | 19.9 |
| CPA.7.050 | 68.3 |

### Summary and Conclusions

[0673] A phage display antibody discovery campaign was conducted to isolate binders against the immuno-oncology target PVRIG using a recombinant Fc-tagged version of the antigen. Quality control analysis showed that the panning antigen was pure and functionally active. The panning effort yielded 49 unique fab clones that specifically bound to the PVRIG target, both as a recombinant protein and on the cell surface. Of these, 35 were successfully produced as human IgG1 antibodies and were shown to retain specific binding to the PVRIG. This pool of antibodies displayed high affinities in a FACS assays, with 18 out of 35 antibodies binding with a KD<10 nM.

### Example 10 Demonstration of the Ability of the Anti-Human PVRIG Fabs to Block the Interaction Between PVRIG and PVRL2 by ELISA

[0674] Method:

[0675] The human PVRL2-His (Catalog #2229-N2-050/CF, R&D Systems), was coated on the ELISA plate. Fab periplasmic extracts (PPEs), diluted 1:1 in 5% skim milk, were preincubated with 1 μg/ml (final concentration) of the human PVRIG-Fc, for 15 min at RT. The fab-receptor mixture was allowed to bind the PVRL2-His coated on the ELISA plate. The PVRIG-Fc/PVRL2-His interaction was probed using anti-human Fc antibody, conjugated to HRP (Jackson Immuno Research catalog #709-035-098). In the absence of PPE (negative wells), a strong positive signal was expected. For blocking fabs, the signal would be significantly reduced. The fab clones with >5-fold lower signal than the negative wells (>80% blocking) could be selected as blocking fabs.

### Protocol:

[0676] ELISA plates (Costar 9018) were coated with 50 ul of 2 μg/ml antigen and were stored at 4° C. overnight. The antigen-coated plates were washed 3 times with 1×PBS. The plate was blocked with 200 μl of 5% skim milk in PBS and incubated 1 hr at RT (room temperature). Next the plate was washed with 1×PB.

[0677] After adding 50 μl/well of Fab PPEs (diluted in 5% skim milk), the plate was preincubated with 1 μg/ml of the human PVRIG-Fc that was added to the respective wells. The “no fab” control was performed with 2 wells.

[0678] The plate was incubated 1 hr at RT.

[0679] The plates were washed 3 times with 1×PBST and 3 times with 1×PBS.

[0680] After adding 50 μl/well of the HRP-conjugated secondary antibody (Jackson Immuno Research, 709-035-098), diluted in 5% milk in PBS, the plate was incubated 1 hr at RT.

[0681] The plates were washed 3 times with 1×PBST and 3 times with 1×PBS.

[0682] After adding 50 μl/well of the TMB substrate and waiting until the color develops, the reaction was stopped by adding 50 μl/well of 2N H2504. Absorbance was measured at 450 nm.

### Results

[0683] FIG. 52 shows the results of testing anti-PVRIG antibodies for their ability to block at least 80% of PVRL2 binding to PVRIG. As shown, a large number of such antibodies were able to successfully block at least 80% of the binding. Specifically the antibodies which blocked successfully are designated as follows:

[0684] CPA.7.001, CPA.7.003, CPA.7.004, CPA.7.006, CPA.7.008, CPA.7.009, CPA.7.010, CPA.7.011, CPA.7.012, CPA.7.013, CPA.7.014, CPA.7.015, CPA.7.017, CPA.7.018, CPA.7.019, CPA.7.021, CPA.7.022, CPA.7.023, CPA.7.024, CPA.7.033, CPA.7.034, CPA.7.036, CPA.7.040, CPA.7.046, CPA.7.047, CPA.7.049, CPA.7.050,

### Example 11: Surface Plasmon Resonance Study of Epitope Binning of 37 Anti PVRIG IgG Antibodies Binding to Human PVRIG Fusion Protein

### Materials and Methods

[0685] Experiments were performed using a ProteOn XPR 36 instrument at 22° C. with all samples kept at 4° C. during the experiment.

[0686] Step 1: The following anti-PVRIG mAbs were each diluted to ˜10 μg/mL in 10 mM sodium acetate, pH 5.0 and covalently immobilized on independent spots on a ProteOn GLC biosensor chip using standard amine coupling:

CPA.7.002
CPA.7.003
CPA.7.004
CPA.7.005
CPA.7.007
CPA.7.009
CPA.7.010
CPA.7.011
CPA.7.012
CPA.7.014
CPA.7.015
CPA.7.016
CPA.7.017
CPA.7.018
CPA.7.019
CPA.7.020
CPA.7.021
CPA.7.022
CPA.7.023
CPA.7.024
CPA.7.026
CPA.7.028
CPA.7.029
CPA.7.032
CPA.7.033
CPA.7.034
CPA.7.036
CPA.7.037
CPA.7.038
CPA.7.039
CPA.7.040
CPA.7.043
CPA.7.045
CPA.7.046
CPA.7.047
CPA.7.050

[0687] The activation step occurred in the horizontal flow direction for five minutes while the immobilization step occurred in the vertical flow direction. MAbs were injected for four minutes after surface activation. The blocking step occurred in both the vertical and horizontal positions at five minutes each so that the horizontal “interspots” could be used as reference surfaces. MAbs were immobilized at a range of ˜450 RU-5000 RU. An additional mAb CPA.7.041 was also binned in this study, but only as an analyte in solution. See below.

[0688] Step 2: Preliminary experiments involved several cycles of injecting ˜20 nM PVRIG antigen (PVRIG H:H-2-1-1 #448, GenScript) over all immobilized mAbs for three minutes at a flow rate of 254/min followed by regeneration with a 30-second pulse of 10 mM glycine-HCl, at either pH 2.0 or pH 2.5, depending on the horizontal row of mAbs in the GLC chip array. Antigen samples were prepared in degassed PBST (PBS with 0.05% Tween 20) running buffer with 100 μg/mL BSA. These preliminary experiments showed that clones CPA.7.026 and CPA.7.029 did not bind to the antigen and were therefore not binned. The remaining mAbs on the ProteOn array showed reproducible binding to the antigen.

[0689] Step 3: A “pre-mix” epitope binning protocol was performed because of the bivalency of the fc-fusion PVRIG antigen. In this protocol each mAb listed in Step 1, plus mAb CPA.7.041, was pre-mixed with PVRIG antigen and then injected for three minutes over all immobilized mAbs. The molar binding site concentration of each mAb was in excess of the molar antigen binding site concentration. The final binding site concentration of each mAb was ˜400 nM and the final binding site concentration of the antigen was ˜20 nM. An antigen-only control cycle was performed after very eight mAb injection cycles to monitor the activity of the immobilized mAbs throughout the experiment. Buffer blank injections were also performed after about every eight mAb injection cycles for double-referencing. Additional controls included each mAb injected alone over all immobilized mAbs at concentrations identical to the pre-mix injection cycles. All surfaces were regenerated with a 30 second pulse of 10 mM glycine-HCl at either pH 2.0 or pH 2.5 depending on which row of mAbs in the array was being regenerated, and all cycles were run at a flow rate of 25 μL/min. MAb and antigen samples were prepared in degassed PBST running buffer with 100 μg/mL BSA.

[0690] Step 4: Sensorgram data were processed and referenced using ProteOn Manager Version 3.1.0.6 using interspots and buffer blanks for double-referencing. The mAb-only control injections were used as the injection references where significant binding with the mAb-only injections was observed. An antibody pair was classified as having a shared antigen binding epitope (designated as a red “0” in the matrix in FIG. 43) if no binding was observed from the injection of mixed mAb and antigen over the immobilized mAb, or if binding was significantly reduced as compared to the antigen-only control injection over the same immobilized mAb. An antibody pair was classified as binding to different antigen epitopes, or “sandwiching” the antigen (designated as a green “1” in the matrix in FIG. 43) if the injection of mixed mAb and antigen showed binding to the immobilized mAb similar to or greater than the antigen-only control over the same immobilized mAb.

[0691] Step 5: The blocking pattern for mAb CPA.7.041 (#37) was studied only as an analyte because the GLC chip array has only 36 spots. Therefore for consistency, hierarchical clustering of the binding patterns in the binary matrix for each mAb pre-mixed with antigen (vertical patterns in FIG. 42) was performed using JMP software version 11.0.0. The blocking patterns of the immobilized mAbs (horizontal patterns in FIG. 42) were also clustered as a comparison to the blocking patterns of the mAbs pre-mixed in solution (data not shown, see Results for discussion).

[0692] Results: FIG. 42 shows the binary matrix of the blocking (“0”) or sandwiching (“1”) between each mAb pair where the mAbs are listed in identical order both vertically (mAbs on the surface—“ligands”) and horizontally (mAbs in solution—“analytes”). Identical “bins” of blocking patterns for all mAbs as analytes are highlighted in FIG. 42 with a black box around each group of similar vertical patterns. FIG. 43 shows the dendrogram of the vertical (analyte) blocking patterns in the matrix in FIG. 42. For the strictest definition of an epitope “bin” where only those mAbs which show identical blocking patterns technically bin together, there are a total of 4 discrete bins. Specifically, 33 of the 35 mAbs that were binned comprise two bins where the only difference between these two bins is whether a mAb sandwiches (Bin 2, see FIGS. 42 and 43) with or blocks (Bin 1, see FIG. 42 and FIG. 43) binding to CPA.7.039. This means that CPA.7.039 is in its own separate bin. The fourth bin consists only of mAb CPA.7.050 which is unable to block antigen binding to any of the other 34 mAbs. Hierarchical clustering of the blocking patterns of the mAbs as ligands (horizontal patterns in FIG. 42) showed mAb CPA.7.016 sandwiching antigen with mAb CPA.7.039 whereas as an analyte it blocks antigen binding to immobilized CPA.7.039. Hence clone CPA.7.016 would be placed in bin 2 rather than in bin 1. The mAbs in each bind are listed in FIG. 43. Processed sensorgram data representative of each bin are shown in FIG. 44 to FIG. 47JJ.

[0693] Summary: 35 anti-PVRIG IgG mAbs were binned using SPR according to their pair-wise blocking patterns with fc fusion human PVRIG. By the strictest definition of an epitope bin, there are a total of four discrete bins. 33 of the 35 mAbs comprise two bins which differ only by whether their respective component mAbs block or sandwich antigen with clone CPA.7.039.

### Example 12 Surface Plasmon Resonance Kinetic Screen of 50 Anti-PVRIG Human Fabs Prepared in Periplasmic Extracts

### Materials and Methods

[0694] All experiments were performed using a Biacore 3000 instrument and a ProteOn XPR 36 instrument at 22° C.

[0695] Step 1: The molar concentration of all 52 fabs in periplasmic extract supernatant were quantitated using a Biacore 3000 instrument at 22° C. Each fab was diluted 20-fold and then injected for 2 minutes at 54/min over high density anti-human fab (GE Healthcare 28-9583-25) surfaces prepared using standard amine coupling with a CM5 Biacore chip (GE Healthcare). A standard human fab at a known concentration (Bethyl P80-115) was then injected over the anti-fab surface with the same conditions as the fab supernatants. Samples were prepared in the running buffer which was degassed HBSP (0.01 M HEPES, 0.15 M NaCl, 0.005% P20, pH 7.4) with 0.01% BSA added. The association slopes of each SPR sensorgram from each fab supernatant was fit against the SPR association slope of the standard human fab of known concentration using CLAMP 3.40 software to estimate the molar concentrations of each fab in supernatant.

[0696] Step 2: A high density goat anti-human fc polyclonal antibody surface (Invitrogen H10500) was prepared using standard amine coupling over two lanes of a GLC chip using a ProteOn XPR 36 biosensor. A high density anti-mouse fc polyclonal antibody surface (GE Healthcare BR-1008-38) was prepared using standard amine coupling over two different lanes of the same GLC chip. The activation and blocking steps for all four capture surfaces occurred in the vertical flow direction. Each fab in supernatant was then injected at three concentrations over fc-fusion human PVRIG (PVRIG-HH-2-1-1 #448, GenScript) and fc-fusion mouse PVRIG (PVRIG-MM-2-1-1 #198, GenScript) which were captured to one high density anti-human fc surface and one anti-mouse fc surface (respectively) at an average of ˜200 RU and ˜290 RU per cycle, respectively. Each fab concentration series was injected for two minutes followed by 10 minutes of dissociation at a flow rate of 50 μL/min. The starting concentration range (as determined in Step 1) was ˜20 nM-˜400 nM with two three-fold dilutions of the highest concentration for each fab. Fabs were diluted into the running buffer which was degassed PBS with 0.05% Tween 20 and 0.01% BSA added. The anti-human fc capture surfaces were regenerated with two 30-second pulses of 146 mM phosphoric acid after each cycle and the anti-mouse fc surfaces were regenerated with two 30-second pulses of 10 mM glycine, pH 1.7 after each cycle.

[0697] Step 3: Sensorgram data of fabs in supernatant binding to captured PVRIG were processed and double-referenced using ProteOn Manager version 3.1.0.6. The sensorgrams were double-referenced using the corresponding anti-species capture surfaces with no captured PVRIG as reference surfaces and a blank injection over the captured PVRIG under identical conditions as the injections of the fabs. Where possible, the sensorgrams for the three different concentrations of each fab were then globally fit to a 1:1 kinetic model (with a term for mass transport) to estimate the association and dissociation rate constants. Sensorgrams which did not show simple 1:1 binding were not fit with the kinetic model and therefore were not assigned estimates for kₐ and k_{d}.

### Results

[0698] None of the fabs included in this study showed binding activity to mouse PVRIG (data not shown). Sensorgrams for 17 of the 50 fabs screened against the human PVRIG could be fit for reliable estimates of their rate constants. Twenty eight clones showed complex kinetics, five of the fabs did not show any binding to the captured human PVRIG fusion protein (CPA.7.025, CPA.7.026, CPA.7.027, CPA.7.029, CPA.7.035) and one clone (CPA.7.035) showed no titer when performing the concentration determination in Step 1. The rate constants and their corresponding sensorgrams are shown below in FIG. 49 and FIGS. 50A-50Q. The clones listed below showed complex kinetics. FIGS. 51A-51C shows some examples of these data.

| | | | |
|---|---|---|---|
| CPA.7.001 | CPA.7.006 | CPA.7.013 | CPA.7.045 |
| CPA.7.030 | CPA.7.036 | CPA.7.014 | CPA.7.046 |
| CPA.7.031 | CPA.7.037 | CPA.7.041 | CPA.7.017 |
| CPA.7.032 | CPA.7.009 | CPA.7.042 | CPA.7.018 |
| CPA.7.033 | CPA.7.038 | CPA.7.043 | CPA.7.047 |
| CPA.7.034 | CPA.7.039 | CPA.7.016 | CPA.7.023 |
| CPA.7.003 | CPA.7.011 | CPA.7.044 | CPA.7.024 |

### Example 13: Measuring the Binding Affinity of IgG Clone CPA.7.021 to PVRIG Expressed on HEK Cells Using Flow Cytometry

### Materials and Methods

[0699] Flow cytometry was used to measure the affinity of CPA.7.021 IgG binding to human PVRIG expressed on HEK 293 cells. CPA.7.021 conjugated with Alexa 647 was added in duplicate at a binding site concentration range of 3 pM-101 nM in a 2-fold serial dilution to a constant number of cells (100,000 cells/well) over 17 wells in a 96-well plate. One well contained cells without any added IgG to serve as a blank well. The cells were equilibrated for 4 hours with IgG at 4° C. Cells were washed twice and then the Mean Fluorescence Intensity (MFI) was recorded over approximately 10,000 “events” using an Intellicyte flow cytometer. The resulting MFI values as a function of the CPA.7.021 IgG binding site concentration are shown below. The KD of CPA.7.021 binding to HEK 293 cells expressing human PVRIG was estimated by fitting the MFI vs. the IgG binding site concentration curve with a 1:1 equilibrium model as detailed in Drake and Klakamp, Journal of Immunol Methods, 318 (2007) 147-152.

[0700] Results:

[0701] Alexa647 labelled CPA.7.021 IgG was titrated with HEK 293 cells expressing human PVRIG and the binding signal was measured using flow cytometry. The resulting binding isotherm, showing MFI in duplicate vs. the binding site concentration of CPA.7.021, is presented below. The red line is a 1:1 equilibrium fit of the curve that allows for a KD estimate of 2.5 nM±0.5 nM (95% confidence interval of the fit, N=1).

### Example 14 Effect of PVRIG Knock Down (KD) and Anti-PVRIG Antibody on Human Melanoma Specific TILs Function

[0702] The aim of these assays is to evaluate the functional capacity of PVRIG in human derived TILs, as measured by activation markers and cytokine secretion, upon co-culture with melanoma target cells. PD1 was used as a benchmark immune-checkpoint for the knock down (siRNA) studies. The effect of anti-PVRIG antibody (CPA.7.21), which has been shown to block the interaction of PVRIG and PVRL2, alone or in combination with other antibodies (e.g aTIGIT, DNAM1) was evaluated.

### Materials and Methods

### TILs

[0703] Tumor-infiltrating lymphocytes (TILs) from three melanoma patients were used:
[0704] TIL-412-HLA-A2-Mart1 specific
[0705] TIL-F4-HLA-A2-gp100 specific
[0706] TIL-209-HLA-A2-gp100 specific

[0707] TILs were thawed in IMDM (BI, 01-058-1A) full medium supplemented with 10% human serum (Sigma, H3667)+1% Glutamax (Life technologies, 35050-038)+1% Na-Pyruvate (Biological Industries, 03-042-1B)+1% non-essential amino acids (Biological Industries, 01-340-1B)+1% Pen-Strep (Biological Industries, 03-031-1B)+300 U/ml of rhIL2 (Biolegend, 509129).

[0708] Tumor Cell Lines:

[0709] Human melanoma cells Mel-624 express MART-1 and gp-100 antigens in the context of MHC-I haplotype HLA-A2. Cells were cultured in complete DMEM medium (Biological Industries, 01-055-1A) supplemented with 10% FBS (BI, 04-127-IA), 25 mM HEPES buffer (BI, 03-025-1B), 1% Glutamax (Life technologies, 35050-038), and 1% Pen-Strep (Biological Industries, 03-031-1B).

[0710] Knock Down in TILs:

[0711] Knock-down (KD) of human PVRIG and human PD1 in TILs was done using 100 pmol of Dharmacon ON-TARGETplus human PVRIG siRNA—SMARTpool (L-032703-02) or Human PD1 siRNA—SMARTpool (L-004435) or non-targeting siRNA (D-001810-01-05). siRNA were electroporated to TILs (AMAXA, program X-005). Electroporation was done on resting TILs cultured in full IMDM supplemented with IL-2 24 hr post thawing. After the electroporation TILs were seeded in 96 well TC plate to recover for 24 hr. After 24 hr, cells were harvested and stained with viability dye (BD Horizon; Cat#562247, BD biosciences), washed with PBS and stained with anti-human PVRIG—CPA.7.021 (CPA.7.021 IgG2 A647, 7.5 μg/ml) or with anti-human PD-1 (Biolegend, #329910 AF647, 5 μg/ml) in room temperature for 30 min. isotype control used are synagis (IgG2 A647, 7.5 μg/ml) and mouse IgG1 (Biolegend #400130 A647, 5 μg/ml) respectively. All samples were run on a MACSQuant analyzer (Miltenyi) and data was analyzed using FlowJo software (v10.0.8).

[0712] Co-Culture of TILs with 624 Melanoma Cells:

[0713] siRNA electroporated TILs were harvested and seeded in 96 TC plate 5×104/well. Mel-624 cells were harvested as well and seeded in 1:1/1:3 E:T ratios in co-culture. The plate was incubated overnight (18 hr) in 37° C., 5% CO2.

[0714] To assess the effect of anti-PVRIG antibody (CPA.7.021), anti-TIGIT (Clone 10A7) and anti-DNAM1 (clone DX11) on melanoma specific TIL activity, TILs (1×10⁵ cells/well) were pre-incubated with tested antibodies or relevant isotype controls in mono-treatment (10 μg/mL) or in combination-treatment (final 10 μg/mL for each) prior to the addition of 624 Melanoma target cells at a 1:1 Effector:target ratio. The plate was incubated overnight (18 hr) in 37° C., 5% CO2.

[0715] Assessment of TILs Activation:

[0716] 16 hours post co-culture, cells were stained with viability dye (BD Horizon; Cat#562247, BD biosciences), washed with PBS and exposed to Fc blocking solution (cat#309804, Biolegend), followed by surface staining with anti-CD8a (Cat #301048, Biolegend) and anti-CD137 (Cat #309804, Biolegend) in 4° C. for 30 min. All samples were run on a MACSQuant analyzer (Miltenyi) and data was analyzed using FlowJo software (v10.0.8). Culture supernatants were collected and analyzed for cytokine secretion by CBA kit (Cat #560484, BD).

### Results

[0717] PVRIG Knock-Down in TILs:

[0718] TIL MART-1 and TIL F4 were cultured 24 hr with IL-2. 100 pmol of ON-TARGETplus human PVRIG siRNA—SMART pool (L-032703-02) or Human PD1 siRNA—SMARTpool (L-004435) or non-targeting siRNA (D-001810-01-05) were electroporated to TILs (AMAXA, program X-005). Detection of PVRIG or PD-1 was performed 24 hr post electroporation (and prior to co-culture). Cells were stained for viability dye followed by 30 min RT incubation with anti PVRIG or anti PD-1. The percentage of KD population is indicated in FIG. 82.

[0719] Functional Assay Using Knocked Down TILs:

[0720] Human TILs, cultured for 24 hours with IL2 were electroporated with siRNA encoding for human PVRIG or PD-1 or scrambled sequence as control. TILs were tested for PVRIG and PD-1 expression 24 hr post electroporation. ˜80% knock down of PVRIG and ˜50% knock down of PD-1 compared to scrambled-electroporated TILs was observed (FIG. 82).

[0721] KD TILs were cultured with Mel-624 cells in 1:1 or 1:3 E:T for 18 hr and were stained for the expression of CD137. Elevated levels of activation marker CD137 were shown in TIL MART-1 electroporated with PVRIG siRNA, similarly to TILs that were electroporated with PD-1 siRNA, compared to control scrambled siRNA. Co-culture supernatant was collected and tested for the presence of secreted cytokines. TILs that were electroporated with PVRIG siRNA show a significant increase in IFNγ and TNF levels compared to control SCR siRNA. A similar effect was shown in TILs that were electroporated with PD-1 siRNA (FIGS. 83B and 83C).

[0722] The same trend of increase in activation levels was observed in TIL F4. Co-culture of PVRIG siRNA electroporated TIL F4 with Mel-624 in 1:3 E:T led to increased levels of CD137 surface expression (FIG. 84A) as well as increased secretion of IFNγ in co-culture supernatant (FIG. 84B). Similar trends were observed in TILs that were electroporated with PD-1 siRNA.

[0723] Functional Assay Using Blocking Abs:

[0724] In Vitro Monotherapy and Combo Therapy of Anti-PVRIG and Anti-TIGIT:

[0725] 209 TILs were cultured with Mel-624 cells in 1:1 E:T for 18 hr. Co-culture supernatant was collected and tested for the presence of secreted cytokines. Treatment with anti TIGIT did not affect IFNγ or TNF secretion levels. However, an increase in IFNγ and TNF levels was observed when anti TIGIT and anti PVRIG were added to co-culture in combination (FIGS. 85A and 85B).

[0726] In Vitro Monotherapy and Combo Therapy of Anti-PVRIG and Anti-TIGIT:

[0727] 209 TILs were cultured with Mel-624 cells in 1:1 E:T for 18 hr. TILs were stained for surface expression of activation marker CD137 and showed reduced level of expression upon treatment with anti DNAM-1. Co-culture supernatant was collected and tested for presence of secreted cytokines. Treatment of anti DNAM-1 mediated a trend to increase secreted cytokines IFNγ and TNF. Treatment with anti DNAM-1 and anti PVRIG in combination partially reversed the effect on CD137 expression (FIG. 86C) and enhanced the effect on cytokine secretion IFNγ and TNF (FIG. 5A-B). MART-1 TILs were cultured with Mel-624 cells in 1:1 E:T for 18 hr. Co-culture supernatant was collected and tested for the presence of secreted cytokines. Treatment with anti DNAM-1 reduced CD137 surface expression on TILs and also the secreted cytokines IFNγ and TNF. Treatment with anti DNAM-1 and anti PVRIG in combination partially reversed these effects (FIGS. 86D-86F).

### Summary and Conclusions

[0728] PD1 KD improved TIL activity, as measured by IFNγ and secretion in F4 and MART-1 TILs. An increase (˜20%) of IFNγ and TNF secretion was observed upon PVRIG KD in MART-1 TILs compared to control siRNA. The same trend was observed in CD137 expression upon co-culture with 624 Melanoma cells on F4 TILs.

[0729] Treatment of anti-TIGIT did not affect IFNγ or TNF secretion levels from TILs co-cultured with 624 Mels, however, an increase in IFNγ and TNF levels was observed when anti TIGIT and anti PVRIG (CPA.7.021) were added to co-culture in combination.

[0730] Anti DNAM-1 treatment reduced TIL-MART-1 activation manifested by reduced CD137 and cytokine secretion and anti-PVRIG (CPA.7.21) could partially reverse this effect in combo treatment with DNAM-1 Ab. In TIL 209, IFNγ and TNF secretion levels were slightly elevated (˜10%) with anti DNAM-1, and an increase in IFNγ and TNF levels (˜40% and 30%, respectively) was observed when anti DNAM1 and anti PVRIG (CPA.7.021) were added to co-culture in combination. Collectively, our results suggest that PVRIG is a new co-inhibitory receptor for PVRL2.

### Example 15 Effect of Anti-PVRIG Antibody on Human Melanoma Specific TILs Function in Combination with Anti-TIGIT and Anti-PD1 Antibodies

### Materials and Methods

[0731] TILs: Tumor-infiltrating lymphocytes (TILs) from three melanoma patients were used:
[0732] TIL-412-HLA-A2-Mart1 specific
[0733] TIL-F4-HLA-A2-gp100 specific
[0734] TIL-209-HLA-A2-gp100 specific

[0735] TILs were thawed in IMDM (BI, 01-058-1A) full medium supplemented with 10% human serum (Sigma, H3667)+1% Glutamax (Life technologies, 35050-038)+1% Na-Pyruvate (Biological Industries, 03-042-1B)+1% non-essential amino acids (Biological Industries, 01-340-1B)+1% Pen-Strep (Biological Industries, 03-031-1B)+300 U/ml of rhIL2 (Biolegend, 509129).

[0736] Tumor Cell Lines:

[0737] Human melanoma cells Mel-624 express MART-1 and gp-100 antigens in the context of MHC-I haplotype HLA-A2. Cells were cultured in complete DMEM medium (Biological Industries, 01-055-1A) supplemented with 10% FBS (BI, 04-127-1A), 25 mM HEPES buffer (BI, 03-025-1B), 1% Glutamax (Life technologies, 35050-038), and 1% Pen-Strep (Biological Industries, 03-031-1B).

[0738] Co-Culture of TILs with 624 Melanoma Cells in the Presense of Anti-PVRIG, Anti-TIGIT and PD1 blocking antibodies:

[0739] To assess the effect of anti-PVRIG antibody (CPA.7.021), anti-TIGIT (Clone 10A7) and anti-PD1 (mAb 1B8, Merck) on melanoma specific TIL activity, TILs (3×104 cells/well) were pre-incubated with tested antibodies or relevant isotype controls in mono-treatment (10 μg/mL) or in combination-treatment (final 10 μg/mL for each) prior to addition of 624 Melanoma target cells at 1:3 Effector:target ratio. Plate was incubated overnight (18 hr) in 37° C., 5% CO2.

[0740] Assessment of TILs Activation:

[0741] Culture supernatants were collected and analyzed for cytokine secretion by CBA kit (Cat #560484, BD).

[0742] In Vitro Monotherapy Anti-PVRIG and Combo-Therapy of with Anti-TIGIT and PD1 Blocking Antibodies:

[0743] F4 TILs (gp100 specific) were cultured with Mel-624 cells in 1:3 E:T for 18 hr. Co-culture supernatant was collected and tested for presence of secreted cytokines. Treatment of anti-TIGIT or anti-PD1 did not affect IFNγ or TNF secretion levels. However, an increase in IFNγ and TNF levels was observed when anti TIGIT or anti-PD1 in combination with anti PVRIG were added to co-culture in combination (FIGS. 87A and 87B).

[0744] Treatment of anti-PVRIG, anti-TIGIT and PD1 alone did not affect IFNγ or TNF secretion levels from TILs co-culture with 624 Mels, however, an increase in IFNγ and TNF levels was observed when anti-TIGIT or anti-PD1 antibodies were added in combination with anti PVRIG (CPA.7.021). The presented data suggest that there is synergestic effect for combinatory therapy with anti-TIGIT or anti-PD1 antibodies.

### Example 16: Effect of Anti-PVRIG Antibodies on TCR Signaling Using Reporter Gene Assay

[0745] A reporter assay system for TCR signaling, such as the Jurkat-NFAT-Luc cell line, is used to test the effect of anti-PVRIG antibodies on TCR mediated signaling. This Jurkat cell line derivative expresses the luciferase reporter gene under the control of the NFAT response element. These cells are transfected with a vector encoding full length human PVRIG. As negative control, cells transfected with empty vector are used. Transfectants with vectors encoding for costimulatory or coinhibitory reference molecules, such as CD28 and PD-1, serve as positive control. Transfectants are stimulated by the addition of anti-human CD3 (e.g. OKT3) in the absence or presence of anti-PVRIG antibodies. Isotype control serves as negative control. Known functional antibodies against the reference molecules serve as positive controls. A functional agonistic crosslinking antibody is expected to show an inhibitory effect on the luciferase activity.

### Example 17 Effect of Anti-PVRIG Antibodies on T Cell Activation Using PVRL2-Fc

[0746] A plate bound assay is used to test the effect of anti-PVRIG antibodies on T cell activation, proliferation and cytokine secretion. Purified human bulk T cells are stimulated using 1 μg/ml plate bound anti-human CD3 (e.g. OKT3) and 5 μg/ml PVRL2-Fc (recombinant fused protein composed of the ECD of PVRL2, the counterpart of PVRIG) or negative control. T cell activation is evaluated by expression of activation markers, e.g. CD137, or by cell division as evaluated by dilution of CFSE dye (T cells are labeled with CFSE prior to their stimulation). Cytokine production (e.g. IFNg, IL-2) is also assessed as additional readout of T cell activation. T cell subtype markers are used to distinguish specific effects on CD4 or CD8 T cells. The co-immobilized PVRL2-Fc could have a basal stimulatory effect on T cell activation, mediated through endogenous DNAM1—a known costimulatory counterpart receptor of PVRL2 on T cells. In the presence of antagonistic anti-PVRIG Abs, this stimulatory basal effect of PVRL2-Fc is expected to be further enhanced, due to their blocking of the inhibitory influence of endogenous PVRIG on T cell activation. Accordingly, agonistic anti-PVRIG Abs are expected to show inhibition of T cell activation.

### Example 18: Effect of Anti-PVRIG Antibodies on T Cell Activation Using PVRL2 Ectopic Expressing Cells

[0747] A cell based assay is used to test the effect of anti-PVRIG antibodies on T cell activation, proliferation and cytokine secretion. Purified human bulk or CD4 or CD8 T cells are stimulated upon co-culture with CHO stimulator cells (CHO cells expressing membrane-bound anti-CD3) ectopically expressing PVRL2 or empty vector. T cell activation is evaluated by expression of activation markers, e.g. CD137, or by cell division as evaluated by dilution of CFSE dye (T cells are labeled with CFSE prior to their stimulation). Cytokine production (e.g. IFNγ, IL-2) is also assessed as additional readout of T cell activation. T cell subtype markers are used to distinguish specific effects on CD4 or CD8 T cells. The PVRL2-expressing CHO stimulators are expected to have a basal stimulatory effect on T cell activation, mediated through endogenous DNAM1—a known costimulatory counterpart receptor of PVRL2 on T cells. In the presence of antagonistic anti-PVRIG Abs, this stimulatory basal effect of surface expressed PVRL2 is expected to be further enhanced, due to their blocking of the inhibitory influence of endogenous PVRIG on T cell activation. Accordingly, agonistic anti-PVRIG Abs are expected to show inhibition of T cell activation.

### Example 19 Effect of Anti-PVRIG Antibodies on T Cell Activation Using the SEB Assay

[0748] Anti-PVRIG antibodies are tested for their effect on T cell activity using blood cells from healthy volunteers and SEB (Staphylococcus enterotoxin B) superantigen to engage and activate all T cells expressing the Vβ3 and Vβ8 T cell receptor chain. Human PBMCs are cultured in 96-well round-bottom plates and pre-incubated for 30-60 min with the tested antibodies. SEB is then added at various concentrations ranging from 10 ng/mL to 10 μg/mL. Supernatants are collected after 2 to 4 days of culture and the amount of cytokine (e.g. IL-2, IFNγ) produced is quantified by ELISA or using standard CBA kit. SEB stimulates cytokine production by whole-blood cells in a dose dependent manner. The effect of anti-PVRIG mAbs on cytokine production is tested at several Ab doses. Blocking anti-PVRIG mAbs are expected to enhance IL-2 production over control IgG. In addition to IL-2, the effect of the Abs on the levels of additional cytokines such as TNFα, IL-17, IL-7, IL-6 and IFNγ can be tested in this assay using a CBA kit.

### Example 20: Effect of Anti-PVRIG Antibodies in Ag-Specific Assays

[0749] An assay that is used to profile the functional effect of anti-human PVRIG antibodies on Ag specific stimulation of pre-existing memory T cells in healthy donor blood is the tetanus toxoid (TT) assay. To this end, freshly prepared PBMC (2×10⁵ cells) are plated in 96 well round-bottom plates in complete RPMI 1640 medium (containing 5% heat inactivated human serum), pre-incubated with tested antibodies at varying concentration and stimulated with TT (Astarte Biologics) at a concentration of 100 ng/mL The cells are incubated for 3-7 days at 37° C., after which supernatants are harvested. Cytokine concentrations (e.g. IL-2, IFN-γ) are determined by ELISA and/or CBA kit. Blocking anti-PVRIG Abs are expected to enhance T cell proliferation and cytokine production compared to that obtained with TT antigen alone.

[0750] Similarly to the method described above, which uses TT to stimulate human memory T cells, we can test the effect of anti-PVRIG Abs on T cell activation upon recall responses to additional antigens such as CMV, EBV, influenza HIV, mumps, and TB, using a similar experimental setup as described above. This can also be used to test the effect of anti-PVRIG antibodies on stimulation of naïve cells using neo-antigens such as KLH.

[0751] In addition, the effect of anti-PVRIG Abs is tested on the antigen specific responses of tetramer-sorted Ag-specific CD8 T cells from peripheral blood of patients suffering from viral infections such as HCV and HIV. Tetramer sorted CD8 T cells are co-cultured with peptide-loaded autologous PBMCs for 5 days. Proliferation of CD8 Ag-specific T cells and secretion of cytokines (e.g. IFNγ, IL2, TNF-α) are evaluated. We expect anti-PVRIG antibodies to enhance proliferation and cytokine production, compared to antigen alone.

### Example 21: Binding and Functional Analysis of Hybridoma-Derived Antibodies Against PVRIG

[0752] This example shows the characterization of binding of hybridoma-derived antibodies (the CHA antibodies) to human and cynomolgus PVRIG protein in cell lines and primary leukocytes, as well as the characterization of the capacity of hybridoma-derived antibodies to block the interaction between PVRIG and PVRL2.

[0753] Protocols

[0754] FACS analysis of hPVRIG over-expressing cells: The following cell lines were used to assess the specificity of anti-human PVRIG antibodies: HEK parental and HEK hPVRIG over-expressing cells. These cells were cultured in DMEM (Gibco)+10% fetal calf serum (Gibco)+glutamax (Gibco). For the HEK hPVRIG over-expressing cells, 0.5 μg/ml puromycin (Gibco) was also added to the media for positive selection. For FACS analysis, all cell lines were harvested in log phase growth and 50,000-100,000 cells per well were seeded in 96 well plates. Anti-human PVRIG antibodies (mIgG1 or mIgG2a) and their respective controls were added in single point dilutions (5 μg/ml), or as an 8 point titration series starting at 10 μg/ml on ice for 30 mins-1 hr. The titration series were conducted as either 1:3 or 1:3.3 fold serial dilutions. Data was acquired using a FACS Canto II (BD Biosciences) or IntelliCyt (IntelliCyt Corporation) and analyzed using FlowJo (Treestar) and Prism (Graphpad) software.

[0755] FACS Analysis of Human Cell Lines for hPVRIG:

[0756] The following cell lines were used to assess the expression and specificity of anti-human PVRIG antibodies: Jurkat and HepG2. Jurkat cells were cultured in RPMI media+10% fetal calf serum, glutamax, non-essential amino acids (Gibco), sodium pyruvate (Gibco), and penicillin/streptomycin (Gibco). HepG2 cells were cultured in DMEM+10% fetal calf serum+glutamax. For FACS analysis, all cell lines were harvested in log phase growth and 50,000-100,000 cells per well were seeded in 96 well plates. Anti-human PVRIG antibodies (mIgG1 or mIgG2a) and their respective controls were added in single point dilutions (5 μg/ml), or as an 8 point titration series starting at 10 μg/ml on ice for 30 mins-1 hr. The titration series were conducted as either 1:3 or 1:3.3 fold serial dilutions. Data was acquired using a FACS Canto II or IntelliCyte and analyzed using FlowJo and Prism software.

[0757] FACS Analysis of Naïve Human Primary Leukocytes for hPVRIG:

[0758] Primary leukocytes were obtained by Ficoll (GE Healthcare) gradient isolation of peripheral blood (Stanford Blood Bank). Leukocytes as isolated peripheral blood mononuclear cells (PBMC) were frozen down in liquid nitrogen at a density between 1×10⁷ and 5×10⁷ cells/ml in a 10% DMSO (Sigma), 90% fetal calf serum mixture. To assess protein expression of PVRIG on PBMC, antibody cocktails towards major immune subsets were designed that included human anti-PVRIG antibodies. Anti-human PVRIG antibodies (mIgG1 or mIgG2a) and their respective controls were added in single point dilutions (5 μg/ml), or in some cases, as a 4 point titration series starting at 10 μg/ml on ice for 30 mins-1 hr.

[0759] Briefly, antibody cocktail mixtures were added to resuscitated PBMC that were seeded at 5×10⁵-1×10⁶ cells/well upon prior Fc receptor blockade and live/dead staining (Aqua Live/Dead, Life Technologies). Antibody cocktails were incubated with PBMC for 30 mins-1 hr on ice. PBMC were then washed and data was acquired by FACS using a FACS Canto II. Data was analysed using FlowJo and Prism software. Immune subsets that were analysed include CD56 dim NK cells, CD56 bright NK cells, CD4+ T cells, CD8+ T cells, non-conventional T cells (e.g. NKT cells and γδ T cells), B cells, and monocytes.

[0760] FACS Analysis of Cynomolgus PVRIG Engineered Over-Expressing Cells:

[0761] The following cell lines were used to assess the cross-reactivity of anti-human PVRIG antibodies with cynomolgus PVRIG (cPVRIG): expi parental and expi cPVRIG over-expressing cells. These cells were cultured in DMEM+10% fetal calf serum+glutamax. expi cPVRIG transient over-expressing cells were generated by electroporating cPVRIG DNA into parental expi cells using the Neon transfection system. For FACS analysis, expi cPVRIG cells were used between 1-3 days post transfection. Parental expi cells were harvested from log growth phase. 50,000-100,000 cells of per well of each type were seeded in 96 well plates. Anti-human PVRIG antibodies (mIgG1 or mIgG2a) and their respective controls were added in single point dilutions (5 μg/ml), or as an 8 point titration series starting at 10 μg/ml on ice for 30 mins-1 hr. The titration series were conducted as either 1:3 or 1:3.3 fold serial dilutions. Data was acquired using a FACS Canto II or IntelliCyte and analyzed using FlowJo and Prism software.

[0762] FACS Analysis of Naïve Primary Cynomolgus Monkey Leukocytes:

[0763] Primary cynomolgus monkey (cyno) leukocytes were obtained from fresh blood which was drawn no longer than 24 hours prior to expression analysis. Blood was sourced from Bioreclamation. To assess protein expression of PVRIG on cyno PBMC, antibody cocktails towards major immune subsets were designed that included human anti-PVRIG antibodies. Anti-human PVRIG antibodies (mIgG1 or mIgG2a) and their respective controls were added in single point dilutions (5 μg/ml), or as an 8 point titration series starting at 10 μg/ml on ice for 30 mins-1 hr.

[0764] Briefly, antibody cocktail mixtures were added to PBMC that were seeded at 5×10⁵-1×10⁶ cells/well upon prior Fc receptor blockade and live/dead staining. Antibody cocktails were incubated with PBMC for 30 mins-1 hr on ice. PBMC were then washed and data was acquired by FACS using a FACS Canto II. Data was analysed using Prism software. Immune subsets that were analysed include CD16+ lymphocytes, CD14+/CD56+ monocytes/myeloid cells, and CD3+ T cells.

[0765] Cellular-Based Competition Assays:

[0766] The ability of PVRIG antibodies to inhibit the interaction of PVRIG with its ligand PVRL2 was assessed in a cellular competition assay. In this assay, the ligand PVRL2 is endogenously expressed on un-manipulated HEK cells and soluble Fc-tagged PVRIG (manufactured on demand by Genscript) is added. In this case, the ability of PVRIG antibodies to block soluble PVRIG binding to HEK cells were assessed through the concomitant addition of 33 nM of soluble PVRIG protein and PVRIG antibodies (0.066-66 nM) to 100,000 HEK cells and incubated for 1 hour on ice. The extent of PVRIG Fc binding was detected by addition of anti-human Fc Alexa 647 (Jackson Laboratories) for 20-30 minutes on ice. Cells were washed twice in PBS for acquisition using a FACS Canto II. Data was analyzed using FlowJo (Treestar), Excel (Microsoft) and Prism (GraphPad).

[0767] Results

[0768] Hybridoma PVRIG Antibodies Recognize PVRIG on Overexpressing Cells:

[0769] To screen for antibodies that were specific for PVRIG, we assessed the ability of antibodies that were generated from two hybridoma campaigns to bind HEK cell lines that were engineered to overexpress human PVRIG. The majority of antibodies from these campaigns bound to the HEK hPVRIG cells, albeit with varying affinity. Furthermore, the majority of these antibodies also showed low background binding to HEK parental cell lines indicating high specificity towards PVRIG. FIG. 77 shows one example of the specificity of the PVRIG antibodies. A summary of all binding characteristics of the antibodies towards HEK hPVRIG cells relative to control that were generated in the hybridoma campaigns are displayed in FIGS. 79A and 79B.

[0770] PVRIG Antibodies Recognize PVRIG Protein on Naïve NK and T Cells:

[0771] The populations which displayed the highest level of PVRIG on naïve PBMC subsets were NK and CD8 T cells, and the absolute level of expression between these two cell subsets was similar (gMFI). CD4 T cells showed lower levels of PVRIG, while B cells and monocytes had very low/no detectable expression. A summary of expression on naïve NK cells and CD8 T cells as detected by the antibodies is shown in FIG. 91. Other minor subsets also displayed PVRIG expression and included non-conventional T cells such as NKT cells and γδ T cells. The expression pattern on PBMC subsets was very similar across all donors sourced and analyzed.

[0772] PVRIG is Detected on Jurkat Cell Lines by Hybridoma-Derived PVRIG Antibodies:

[0773] In addition to screening PBMC for PVRIG protein expression, we wanted to understand whether it was also expressed on cancer cell lines. We chose to screen our antibodies on Jurkat cells given their high expression of PVRIG RNA. We also chose HepG2 as a negative control cell line to further validate the specificity of our antibodies. Most of the hybridoma-derived antibodies did detect PVRIG protein expression on Jurkat cells (FIG. 79), but not the HepG2 cells (data not shown). An example of PVRIG detection on Jurkat is shown in FIG. 78 with a representative antibody, CHA.7.518.

[0774] Cellular-Based Biochemical Assays:

[0775] Upon screening our 29 hybridoma antibodies in the cellular biochemical assays, we found that there were 20 clear blockers and 9 non-blockers of the PVRIG-PVRL2 interaction. All of the blocking antibodies were able to inhibit the interaction of PVRIG Fc with HEK cells by at least 50%, with most of these antibodies completely abolishing PVRIG Fc binding. The IC₅₀ values associated with those antibodies that did show blocking capacity are reported in FIG. 92. The majority of IC₅₀ values were between 20-60 nM.

[0776] Summary and Conclusions

[0777] Using a hybridoma platform, we have been able to successfully generate monoclonal antibodies towards the human PVRIG antigen. Using engineered over-expressing cells as well as a suite of cancer cell lines, we showed that our antibodies are highly specific to the PVRIG antigen, and are able to detect protein expression which correlated with RNA expression. Upon analysis of human PBMC subsets, we showed that the PVRIG protein is most highly expressed on NK and T cells, with low/negative expression on B cells and myeloid cells. We also showed that a proportion of these antibodies are cross-reactive with the cynomolgus monkey (cyno) PVRIG antigen through assessing their binding to over-expressing cells. Furthermore, the expression pattern on cyno PBMC is similar to human PBMC. Lastly, we were able to show through a FACS-based competition assay, that a proportion of our hybridoma antibodies are able to inhibit the interaction of PVRIG with its ligand, PVRL2. The antibodies which showed the best characteristics regarding all the aforementioned data were CHA-7-518, CHA-7-524, CHA-7-530, and CHA-7-538.

### Example 22: Effect of CHA Anti-PVRIG Antibodies in the MLR Assay

[0778] An assay used to profile the functional effect of anti-human PVRIG antibodies on allo-antigen responses is proliferation of Human CD8+ T Cells in a Mixed Lymphocyte Reaction (MLR) assay. As is known in the art, MLR is an ex vivo cellular immune assay that provides an in vitro correlation of T cell function.

[0779] Anti-PVRIG antibodies are expected to enhance proliferation of human CD4 and CD8 T cells in response to cells from an MHC-mismatched donor. Human T cells are enriched from whole blood of one donor (e.g. donor A) by using Human T cell RosetteSep® (StemCell Technologies) as per manufacturer's instructions. After separation, cells are fluorescently labeled with CFSE dye (Molecular Probes). To serve as allogeneic antigen presenting cells (APCs), mononuclear cells are first isolated from whole blood from a MHC-mismatched donor (e.g. donor B) and then depleted of CD3+ T cells. APCs are then irradiated with 2500 rads in a cesium irradiator.

[0780] In general, an MLR assay is done as follows. HumanT cells and allogeneic 150,000 APCs are co-cultured in a 96-well flat-bottom plate with 150,000 CD8+ T cells and APCs for 5 days with anti-PVRIG antibodies at different concentrations. On day 5, cells are harvested, washed and stained with anti-CD8-biotin followed by streptavidin-PerCp. Samples are run by FACS to assess the degree of proliferation as depicted by CFSE dilution. Functional blocking anti-PVRIG antibodies are expected to enhance T cells proliferation and cytokine secretion in response to cells from a MHC-mismatched donor.

[0781] An MLR assay was used to characterize the biochemical effect of the CHA antibodies of the invention on resting and activated human T cells, and to characterize the capacity of hybridoma-derived antibodies to modulate T cell proliferation in an MLR setting

[0782] Protocols

[0783] Mixed Lymphocyte Reaction (MLR):

[0784] A mixed lymphocyte reaction was established by co-culturing dendritic cells (DCs) and T cells derived from distinct donors in an allogeneic setting. DCs were generated by culturing purified monocytes with 100 ng/ml GM-CSF (R&D systems) and 100 ng/ml IL-4 (R&D systems) for 7 days. After 7 days, purified CFSE-labelled CD3 T cells were combined with DCs at a 10:1 ratio and were cultured in X vivo-20 serum free media (Lonza) for 5 days. In some conditions, unconjugated anti-PVRIG antibodies or isotype control antibodies were added to the plates at 10 μg/ml. Three MLR assay permutations were set up, where DCs from one donor were co-cultured with CD3 T cells from 3 separate allogeneic donors. All blood products were sourced from Stanford Blood Bank.

[0785] Expression and Functional Analysis:

[0786] After the 5 day MLR culture, the level and extent of T cell activation and proliferation was assessed by CFSE dilution and expression of activation markers such as CD25 and PD-1. In-house anti-PVRIG antibodies from both phage and hybridoma campaigns were used to assess the expression of PVRIG. Expression of the PVRIG ligand, PVRL2, was also assessed in a kinetic fashion on DC. All data was acquired using flow cytometry and data analysis was performed using FlowJo (Treestar) and Prism (Graphpad) software.

[0787] FACS-Based Epitope Analysis:

[0788] As we tested an array of antibodies in the MLR, we were interested in determining whether these antibodies could be epitope ‘binned’ based on FACS-based binding, and whether this ‘binning’ would correlate to changes in T cell activation and proliferation in the assay. To do this, T cells harvested from the assay were pre-incubated with unconjugated PVRIG antibodies, and then counter-stained with a conjugated PVRIG antibody of a different clone. The extent to which the conjugated PVRIG antibody gave a signal on T cells indicated the extent to which this antibody had to compete for PVRIG binding on T cells with the unconjugated antibody. A negative or low signal would indicate that there is high competition, indicating the two antibodies are in the same epitope tin′. A high signal would indicate low or no competition and thus the antibodies would be considered to be in different ‘bins’.

[0789] Results

[0790] Expression of PVRL2 on Monocyte-Derived DC:

[0791] To determine whether PVRL2 would be expressed on DC for the MLR assay, DC were generated from monocytes, and PVRL2 expression was assessed in a kinetic fashion at daily intervals after addition of GM-CSF and IL-4. As indicated in FIG. 72, PVRL2 expression increased from Day 0 until Day 5 where expression peaked. At Day 6, expression decreased slightly compared to Day 5. At Day 7, expression was similar to Day 6 indicating stabilization of PVRL2 expression at these time points. Thus, DC expressed PVRL2 at the appropriate time point for use in the MLR assay.

[0792] Expression of PVRIG on T Cells after MLR Culture:

[0793] Many T cell receptors than modulate function in the MLR are expressed on proliferating T cells. Thus, we wanted to determine whether PVRIG is also expressed. We analysed proliferating T cells at Day 5 post MLR co-culture initiation and were characterized by their dilution of CFSE (i.e. CFSE low). As shown in FIGS. 73A-73B and FIGS. 74A-74B, relative to isotype control (mIgG1), PVRIG was expressed on CFSE low cells as determined by multiple PVRIG antibodies on both CD4 and CD8 T cells across three donors analysed. FACS plots are shown in FIGS. 73A-73B to indicate PVRIG on CFSE low cells, and bar graphs in FIGS. 74A-74B indicate the level of expression of PVRIG relative to mIgG1.

[0794] PVRIG Antibodies Enhance T Cell Proliferation:

[0795] Having shown that PVRIG expression is expressed on proliferating T cells in the MLR, we wanted to determine whether treatment with PVRIG antibodies could affect levels of T cell proliferation. As shown in FIG. 4, addition of PVRIG antibodies into the MLR assay was able to increase the percentage of CFSE low cells across all the hybridoma antibodies tested compared to control. This was observed across all donors analysed.

[0796] PVRIG Antibodies Bind to Multiple Epitopes on PVRIG:

[0797] To compare the PVRIG antibodies for their ability to bind different epitopes on PVRIG, we performed a competition experiment where T cells from the MLR were cultured with unlabeled anti-PVRIG antibodies derived from our hybridoma campaigns for 5 days. T cells were then harvested at day 5 and counter-stained with a conjugated anti-PVRIG antibody that was derived from our phage campaign (CPA.7.021). As shown in FIG. 76, complete or near complete reduction of CPA.7.021 binding was observed in conditions that contained CHA.7.516-M1, CHA.7.518-M1, CHA.7.524-M1, CHA.7.530-M1, and CHA.7.538-M1 when compared to background fluorescence levels, suggesting that these antibodies may overlap in epitope recognition. Partial reduction in CPA.7.021 binding was observed with CHA.7.537-M1, CHA.7.528-M1, and CHA.7.548-M1, suggesting partial overlap in epitope recognition. No reduction in CPA.7.021 binding was observed in cells pre-cultured with CHA.7.543-M1 suggesting an absence of epitope recognition. Collectively, this data indicates that the PVRIG antibodies from our campaigns, when assessed relative to CPA.7.021, could recognize at least 3 different epitopes on PVRIG.

[0798] Conclusions

[0799] We characterized our PVRIG antibodies for their ability to bind to proliferating and resting T cells, as well as their functional activity in a MLR. Binding of multiple PVRIG antibodies was detected on proliferating T cells and was higher on proliferating T cells as compared to resting, especially the CD8+ subset. This data demonstrates that PVRIG expression is increased upon T cell activation. Furthermore, several PVRIG antibodies increased T cell proliferation as compared to mIgG1 isotype indicating that they can also modulate T cell function. As above, these antibodies all have ability to block PVRIG with its ligand, PVRL2. Based on this, we conclude that by blocking the PVRIG-PVRL2 interaction, these antibodies lead to an increase in T cell activation and proliferation, which is a hallmark indication of a desired effect for an immune checkpoint inhibitor that would be used to treat cancer. Lastly, we performed competition experiments comparing the binding of multiple hybridoma-derived PVRIG antibodies to activated T cells, relative to a phage-derived antibody. From this series of experiments, we provide evidence for epitope diversity of our phage and hybridoma-derived antibodies.

### Example 23: Effect of Anti-PVRIG Antibodies on T Cell Activation Upon Combination with Immune Checkpoint Blockade

[0800] The combination of PVRIG blockade with blocking Abs of a known immune checkpoint (e.g. PD1, PDL-1 or TIGIT), is expected to further enhance the stimulatory effect on T cell activation in the assays depicted above.

### Example 24: Functional Analysis of PVRIG Antibodies

[0801] The human PVRIG antibodies of the invention were characterized for the ability to inhibit the interaction of PVRIG with its ligand PVRL2, and their ability to modulate effector lymphocyte function in primary cell-based assays.

[0802] Protocols

[0803] Cellular-Based Biochemical Assays

[0804] The ability of PVRIG antibodies to inhibit the interaction of PVRIG with its ligand PVRL2 was assessed in a cellular biochemical assay format in two orientations.

[0805] In the first orientation, the ligand PVRL2 is endogenously expressed on un-manipulated HEK cells and soluble biotinylated Fc-tagged PVRIG (manufactured on demand by Genscript) is added. In this case, the ability of PVRIG antibodies to block soluble PVRIG binding to HEK cells were assessed through two permutations. In the first permutation, various concentrations of PVRIG antibodies (range 0.066-66 nM) were pre-incubated with 33 nM of soluble PVRIG in phosphate buffered saline (PBS, Gibco) for 30 minutes on ice. This complex was subsequently added to 100,000 HEK cells in and incubated for a further 1 hour on ice. After 1 hour, HEK cells were washed twice in PBS and the extent of soluble PVRIG bound to HEK cells was detected by addition of streptavidin conjugated to Alexa 647 (Jackson Laboratories) for 30 minutes on ice. HEK cells were washed twice in PBS, and resuspended in 100 ul of PBS for acquisition on the FACS Canto II (BD Biosciences). Data was analysed using FlowJo (Treestar) and Prism (Graphpad) software. In the second permutation, 33 nM of soluble PVRIG protein and PVRIG antibodies (0.066-66 nM) were added concomitantly to 100,000 HEK cells and incubated for 1 hour on ice. Subsequent steps to analysis for this permutation are equivalent to the first permutation.

[0806] In the second orientation, HEK cells were engineered to over-express PVRIG and soluble biotinylated Fc-tagged PVRL2 (CD Biosciences) was added. In this case, various concentrations of PVRIG antibodies (range 0-200 nM) with 160 nM soluble PVRL2 were added concomitantly to 100,000 HEK hPVRIG or parental HEK cells, and incubated in PBS+1% BSA+0.1% sodium azide (FACS buffer) for 1 hr on ice. Soluble PVRL2 binding was detected by addition of streptavidin Alexa 647 in FACS buffer for 30 minutes on ice. Cells were washed twice in FACS buffer, and re-suspended in 50 ul of PBS for acquisition on the Intellicyt HTFC (Intellicyt). Data was analyzed using FlowJo (Treestar), Excel (Microsoft) and Prism (GraphPad).

[0807] Primary NK Cell Assay

[0808] The PBMC subset with the most robust expression profile for PVRIG was on NK cells. As such, we designed an NK cell-based co-culture assay with PVRL2-expressing tumor cells to determine whether our antibodies could modulate NK cell-mediated cytotoxicity towards these targets. The targets we chose were the acute B cell lymphocytic leukemia cell line, Reh (ATCC cell bank), and the acute myeloid leukemia cell line, MOLM-13 (DSMZ cell bank). Reh and MOLM-13 cells were grown in RPMI media (Gibco)+20% fetal calf serum (Gibco), glutamax (Gibco), penicillin/streptomycin (Gibco), non-essential amino acids (Gibco), sodium pyruvate (Gibco), HEPES (Gibco), and beta-mercaptoethanol (Gibco).

[0809] Two days prior to the co-culture assay, primary NK cells were isolated using the human NK cell isolation kit (Miltenyi Biotec) and cultured in RPMI media+20% fetal calf serum, glutamax, penicillin/streptomycin, non-essential amino acids, sodium pyruvate, HEPES, beta-mercaptoethanol, and 250 U/ml IL-2 (R&D systems). On the day of the assay NK cells were harvested, enumerated and pre-incubated with PVRIG antibodies for 15-30 minutes at room temperature. During this incubation, target cells were harvested from culture, labelled with Calcein AM (Life Technologies) for 30 minutes at 37° C., washed in media, and enumerated for the assay. NK cell-mediated cytotoxicity assays were set up where a constant number of target cells (50,000) were co-cultured with increasing concentrations of NK cells pre-incubated with 5 μg/ml of PVRIG antibodies (thus altering the NK cell to target ratio). Alternatively, a fixed NK cell to target ratio was used in the assay, but NK cells were pre-incubated with altering concentrations of PVRIG antibody (range 3.9 ng/ml-5 μg/ml) in a dose titration. Upon addition of the NK cells and targets, plates were pulse spun at 1,400 rpm for 1 minute and placed at 37° c. in a 5% CO₂ atmosphere for 4 hours. After 4 hours, plates were spun at 1,400 rpm for 4 minutes, and 80 ul of supernatant was harvested to quantitate the release of Calcein AM from the target cells. The quantity of Calcein AM released from targets was assessed by a Spectramax Gemini XS fluorometer (Molecular Devices). As controls for Calcein AM release, total and spontaneous release was assessed by exposing target cells to 70% ethanol or media only for the duration of the assay. Levels of killing (as a percentage) by NK cells were calculated using the following formula:

(Sample release−spontaneous release)/(total release−spontaneous release)*100

[0810] In addition to PVRIG antibodies, in some cases, other antibodies towards NK cell receptors such as TIGIT (Genentech, clone 10A7, Patent number: WO2009126688 A2) and DNAM-1 (Biolegend, clone 11A8) were also added as comparators.

[0811] Results

[0812] Cellular-Based Biochemical Assays:

[0813] Upon screening a panel of our PVRIG antibodies in the cellular biochemical assays, we found that there was variable levels of inhibition across the antibodies tested, and the level of inhibition was dependent on the permutation and orientation of the assay (FIG. 98). Four antibodies are specifically shown in FIGS. 93A-93C to illustrate these points. The orientation and permutation of the assay which gave the most robust inhibitory effect relative to control, was when soluble PVRIG pre-incubated with PVRIG antibodies was added to HEK cells (FIG. 93a). In this permutation, CPA.7.021 showed the best absolute blocking capacity compared to the other three antibodies (CPA.7.002, CPA.7.005, and CPA.7.050). Despite the differences in level of blocking, all antibodies in this permutation showed similar IC₅₀ values which were in the low nanomolar range, and the blocking capacity plateaued at higher concentrations.

[0814] When the absolute level of inhibition invoked by the four PVRIG antibodies was then measured when soluble PVRIG and PVRIG antibodies were concomitantly added to HEK cells, more variability of blocking in the assay was observed (FIG. 93b). CPA.7.021 remained the best blocking antibody. However, CPA.7.002 and CPA.7.005 showed markedly less ability to inhibit soluble PVRIG binding to HEK cells relative to the control antibody. CPA.7.050 showed an intermediate level of blocking as compared to CPA.7.021, CPA.7.002, and CPA.7.005. This difference in absolute level of inhibition also corresponded to differences in the IC₅₀ values of each antibody. CPA.7.021 and CPA.7.050 again showed low nanomolar IC₅₀ values, although they were both higher than in the first permutation of the assay. In contrast, the IC₅₀ values of CPA.7.002 and CPA.7.005 increased substantially, CPA.7.002 by approximately 20-fold, and CPA.7.005 by approximately 30-fold. This data indicates that how the antibody has to compete for PVRIG binding with its cognate ligand, will indicate the potency with which the antibody can block this interaction.

[0815] When the orientation of the biochemical assay was reversed (i.e. PVRL2Fc was assessed to bind to HEK hPVRIG cells), the ability of the four PVRIG antibodies to block PVRL2 Fc interaction was variable (FIG. 93c). Consistent with the biochemical assays which used HEK cells as targets (FIG. 93a-b), CPA.7.021 and CPA.7.050 inhibited PVRL2 Fc binding to HEK hPVRIG cells, and their ability to block the binding was similar. Surprisingly however, we saw enhancement of PVRL2 Fc binding in the presence of CPA.7.002 and CPA.7.005 antibodies which we did not observe when HEK cells were used as targets.

[0816] NK Cell Cytotoxicity Assay with Reh Cells:

[0817] The first target we investigated in the NK cell cytotoxicity assay was the Reh line. Reh was initially selected as it showed robust levels of PVRL2 by flow cytometry, but a low frequency of other activating ligands such as NKG2D ligands, and low expression of PVR (FIGS. 94A-94H). Traditional NK cell targets were not used, such as K562, due to their expression of a high frequency of NKG2D ligands, and high expression of PVR, which may mask a functional effect of the PVRIG antibodies. Importantly, Reh cells did not express any NK cell receptors known to interact with PVRL2 and PVR such as TIGIT, DNAM-1, and PVRIG.

[0818] Upon screening our panel of PVRIG antibodies in this assay, we found four antibodies that were able to modulate NK cell-mediated cytotoxicity (FIG. 99). These four antibodies were those that were discussed in the biochemical assay results section-CPA.7.002, CPA.7.005, CPA.7.021, and CPA.7.050. In all cases, addition of these antibodies enhanced NK cell-mediated cytotoxicity against Reh cells (FIGS. 95a-95c). Addition of CPA.7.002 and CPA.7.005 enhanced cytotoxicity most robustly (FIGS. 95a-95b), followed by CPA.7.021 and CPA.7.050 which showed similar levels of enhancement (FIG. 95c). FIG. 95d shows a concentration-dependent analysis of enhancement of NK cell-mediated cytotoxicity by CPA.7.002 and CPA.7.021. Blocking antibodies towards receptors that have been reported to also bind PVRL2 such as TIGIT and DNAM-1 were added to the assay with Reh cells as comparators. As shown in FIGS. 95e-95f, the addition of TIGIT and DNAM-1 antibodies did not show functional effects in this assay.

[0819] NK Cell Assay with MOLM-13 Cells:

[0820] To assess whether PVRIG antibodies were able to modulate NK cell-mediated cytotoxicity against a second target, MOLM-13 cells were utilized. MOLM-13 also express PVRL2 analogous to Reh cells, but also have robust expression of PVR (FIG. 94). Like the Reh cells, MOLM-13 did not express any NK cell receptors. Utilization of this cell line, in addition to Reh cells, would indicate whether PVRIG antibodies can modulate NK cell-mediated cytotoxicity in the context of different receptor-ligand interactions, particularly when PVR is expressed.

[0821] Upon screening our PVRIG antibodies in this assay, we found that the functional effect of CPA.7.021 was diminished and did not show significant enhancement of NK cell-mediated cytotoxicity above control levels (FIG. 97a). In contrast, CPA.7.002 and CPA.7.005 were able to enhance NK cell-mediated cytotoxicity in this assay (FIG. 97a). Using a comparator antibody, blockade of TIGIT did not show functional effects in this assay when compared to control (FIG. 97b).

[0822] Summary and Conclusions

[0823] Using our antibody phage platform, we generated a panel of antibodies against the human PVRIG antigen that showed an ability to block the interaction of PVRIG with its ligand PVRL2, and enhance NK cell-mediated cytotoxicity against two hematological cell lines. The ability of the PVRIG antibodies to inhibit PVRIG and PVRL2 interaction was influenced by the orientation of the assay as well as pre-incubation steps, representative of potential antibody dynamics with PVRIG in physiological settings such as cancer. Four antibodies showed an ability to enhance NK cell-mediated cytotoxicity against the Reh cell line, but only two antibodies showed an ability to enhance cytotoxicity against MOLM-13 cells. This difference may be attributed to the alternate receptor-ligand interactions involved in NK cell-mediated recognition of each cell line, and/or differential properties of the antibodies and their potency in modulating the function of PVRIG.

### Example 25: Effect of Anti-PVRIG Antibodies on GD T Cell Activation Using PVRL2 Ectopic or Naturally Expressing Cells

[0824] A cell based assay is used to test the effect of anti-PVRIG antibodies on gamma delta T cell activation, proliferation and cytokine secretion. Purified human gamma delta T cells are activated with HMBPP or IPP and co-cultured with target cells (e.g. REH, MOLM-13) that naturally express PVRL2 or with target cells ectopically expressing PVRL2 or empty vector (e.g. CHO, Raji, 721.221). Gamma delta T cell function is assessed by examining cytokine production (e.g. IFN-γ, IL-17) in cultured supernatants or cytotoxic activity on the target cells. PVLR2 expression is expected to have a basal stimulatory effect on gamma delta T cell activation, mediated through endogenous DNAM1—a known costimulatory counterpart receptor of PVRL2 on gamma delta T cells. In the presence of antagonistic anti-PVRIG Abs, cytokine production or cytotoxic activity is expected to be further enhanced, due to their blocking of the inhibitory function of endogenous PVRIG on gamma delta T cell activation. Accordingly, agonistic anti-PVRIG Abs are expected to show inhibition of gamma delta T cell activation.

### Example 26: Effect of Proteins on Human T Cells Activated Using Anti-CD3 and Anti-CD28 in the Presence of Autologous PBMCs

### Materials and Methods

[0825] In these experiments the effects of PVRIG on human T cells which were activated using anti-CD3 and anti-CD28 in the presence of autologous PBMCS is evaluated. Conversely, this assay can also be used to assay the effects of anti-PVRIG antibodies on T cell activation.

[0826] PVRIG hECD-hIg fusion protein (FIG. 92BA), composed of the ECD of human PVRIG fused to the Fc of human IgG1 bearing C220, C226 and C229 to S mutations at the hinge, was produced at GenScript (China) by transient transfection in CHO-3E7 cells which were cultured for 6 days, followed by protein A purification of cell harvest. The final product was formulated in PBS pH 7.2. Expression vector used was Mammalian Expression Vector pTT5, in which PVRIG gene is driven by CMV promoter.

[0827] CD4+ Human T cell Isolation Kit II is purchased from Miltenyi (Cat. #130-094-131). hIgG1 control (Synagis®) is obtained from Medimmune Inc. Anti-human CD3 Ab (OKT3, Cat#16-0037) and anti-human CD28 Ab (clone CD28. 2; Cat#16-0289) are purchased from eBioscience. Dynabeads M-450 Epoxy (Cat. #140. 11) are purchased from Invitrogen. Buffy coats of human blood are obtained from LifeSource. Ficoll-Paque Plus (Cat. #17-1440-02), is purchased from GE HealthCare.

[0828] Isolation of PBMCs from Buffy Coats Using Ficoll Separation:

[0829] Total PBMCs are suspended in Ex-Vivo 20 medium, and irradiated at 3000 rad. Naïve CD4+ T cells are isolated from buffy coats of three healthy human donors' blood using CD4+ Human T cell Isolation Kit II (Miltenyi) according to manufacturer's instructions and co-cultured with irradiated autologous PBMCs at a ratio of 1:1 (1.5×10⁵ T cells with 1.5×10⁵ irradiated PBMCs per well). The cultures are activated with anti-CD3 (0.5 μg/ml) and anti-CD28 (0.5 μg/ml) antibodies. Either an anti-PVRIG antibody or a PVRIG ECD protein are added to the culture at the indicated concentrations. After 24 hr in culture, cells are pulsed with H3-thymidine. Cells are harvested after 72 hours in culture.

[0830] For the ECD experiment, the results are expected to cause a dose dependent inhibition of T cell proliferation and/or activation, supporting the therapeutic potential of immunoinhibitory PVRIG based therapeutic agents (e.g. PVRIG polypeptides or PVRIG fusion proteins according to at least some embodiments of the invention) for treating T cell-driven autoimmune diseases, such as rheumatoid arthritis, multiple sclerosis, psoriasis and inflammatory bowel disease, as well as for treating other immune related diseases and/or for reducing the undesirable immune activation that follows gene or cell therapy. Essentially, immunoinhibitory PVRIG proteins that agonize PVRIG should prevent or reduce the activation of T cells and the production of proinflammatory cytokines involved in the disease pathology of such conditions.

[0831] In addition, these results are also expected to support a therapeutic potential of immunostimulatory anti-PVRIG antibodies that reduce the inhibitory activity of PVRIG for treating conditions which will benefit from enhanced immune responses such as immunotherapy of cancer, infectious diseases, particularly chronic infections and sepsis. Essentially, immunostimulatory anti=PVRIG antibodies will promote the activation of T cells and elicit the production of proinflammatory cytokines thereby promoting the depletion of cancerous or infected cells or infectious agents.

### Example 27: Inhibition of T Cell Activation Assay

[0832] In these experiments the effects of PVRIG ECDs or anti-PVRIG antibodies on T cell activation in a bead assay.

### Materials & Methods

[0833] Isolation of Human T Cells:

[0834] Buffy coats are obtained from Stanford Blood Bank from healthy human donors. CD3+ T cells are isolated from buffy coats using RosetteSep kit (StemCell Technologies) following manufacturer's instructions. Cells are analyzed with anti-CD45 and anti-CD3 by flow cytometry to evaluate the % of CD3+ cells obtained. Viability is evaluated after thawing prior to the assay.

[0835] Bead Coating and QC:

[0836] Tosyl activated beads (Invitrogen, Cat#14013) at 500×10⁶/ml are coated with anti-CD3 mAb and either PVRIG ECD proteins or anti-PVRIG antibodies in a two-step protocol: with 50 μg/ml human anti-CD3 clone UTCH1 (R&D systems, Cat# mab 100) in sodium phosphate buffer at 37° C. overnight, followed with 0-320 μg/ml of either PVRIG ECD proteins or anti-PVRIG antibodies for another overnight incubation at 37° C.

[0837] The amount of PVRIG protein (either ECD or antibody) bound to the beads is analyzed.

[0838] Bead assay setup: 100 k human CD3+ T cells are cultured with 100 k or 200 k beads coated with various concentrations of the PVRIG protein for 5 days in complete IMDM (Gibco, Cat #12440-053) supplemented with 2% AB human serum (Gibco, Cat#34005-100), Glutmax (Gibco, Cat #35050-061), sodium pyruvate (Gibco, Cat #11360-070), MEM Non-Essential Amino Acids Solution (Gibco, Cat #11140-050), and 2-mercaptoethanol (Gibco, Cat #21985). At the end of 5 day culture, cells are stained with anti-CD25, anti-CD4, anti-CD8, and fixable live dead dye to determine CD25 expression levels on each subset of cells. Supernatants are collected and assayed for IFNγ secretion by ELISA (Human INFγ duoset, R&D systems, DY285).

[0839] In these experiments human CD3 T cells co-cultured with beads coated with various concentration of PVRIG-protein are analyzed for their level of expression of CD25. Both CD4+ and CD8+ cells are anticipated to show dose dependent inhibition by the PVRIG-ECD-fusion protein, or, conversely, both CD4+ and CD8+ cells are anticipated to show dose dependent activation by the PVRIG-antibody.

### Example 29: Epitope Mapping of Anti-Human PVRIG Antibodies Based on Cynomolgus Cross-Reactivity

### Rationale and Objectives

[0840] The objective of this study is to identify the epitopes on the PVRIG protein that determine cross-reactivity of anti-human PVRIG antibodies against the cynomolgus monkey (cyno) orthologue. Many of the lead antibodies against human PVRIG target show varied degrees of cyno cross-reactivity despite the fact that many of these antibodies belong to the same epitope bin. To shed light on the molecular basis of human/cyno cross-reactivity (or lack thereof), several cyno-to-human mutations of the PVRIG recombinant proteins were designed, expressed and purified, and tested for binding to a panel of anti-human PVRIG antibodies in ELISA.

### Methods

[0841] Design of cyno-to-human PVRIG variants: Sequence alignment of human and PVRIG extracellular domains (ECDs) shows 90% sequence identity and 93% sequence homology between human and cyno orthologs (FIG. 100). Based on the nature of the mutations (conserved vs non-conserved) and the secondary structure prediction (coil vs extended) of the mutation region, three site-directed mutants of the cyno PVRIG were designed to probe the cyno-cross reactivity focused epitope mapping. These mutants include H61R, P67S, and L95R/T97I cyno PVRIG. Wild type cyno and human PVRIG were also generated.

[0842] Expression and purification of cyno, human, and hybrid PVRIG variants: All the PVRIG variants were expressed as ECD fusions with a C-terminal 6×His tag (SEQ ID NO:1556) in mammalian cells. The proteins were purified by affinity purification, ion-exchange chromatography, and size-exclusion chromatography. The purified proteins were buffer-exchanged into PBS buffer (pH 7.4) and stored at 4° C.

[0843] ELISA to determine PVRIG-antibody interaction: The functional ELISA was performed as follows: cyno, human, and cyno/human hybrid PVRIG (His-tagged) recombinant proteins were adsorbed on an IA plate overnight at 4° C. Coated plate wells were rinsed twice with PBS and incubated with 300 μL blocking buffer (5% skim milk powder in PBS pH 7.4) at room temperature (RT) for 1 hr. Blocking buffer was removed and plates were rinsed twice more with PBS. Plate-bound PVRIG variants were incubated with anti-human PVRIG mAbs (human IgG1 isotype) in solution (linear range of 0.1 μg/mL to 8 μg/mL in a 50 μL/well volume) at RT for 1 hr. Plates were washed three times with PBS-T (PBS 7.4, 0.05% Tween20), then three times with PBS and 504/well of a HRP-conjugated secondary antibody was added (Human IgG Fc domain specific, Jackson ImmunoResearch). This was incubated at RT for 1 hr and plates were washed again. ELISA signals were developed in all wells by adding 50 μL of Sureblue TMB substrate (KPL Inc) and incubating for 5-20 mins. The HRP reaction was stopped by adding 50 μL 2N H2504 (VWR) and absorbance signals at 450 nm were read on a SpectraMax (Molecular Devices) or EnVision (PerkinElmer) spectrophotometer. The data were exported to Excel (Microsoft) and plotted in GraphPad Prism (GraphPad Software, Inc.).

### Results

[0844] S67, R95, and 197 residues as determinants of cyno cross-reactivity: The binding data shown in FIG. 101 clearly shows that the S67, R95, and 197 residues affect the cyno cross-reactivity of various antibodies. While the P67S cyno-to-human mutation negatively impacts the binding of CPA.7.002 and CPA.7.041, the L95R/T971 cyno-to-human mutation significantly improves the binding of CPA.7.002, CPA.7.021, CPA.7.028, and CPA.7.041. On the other hand, H61R cyno-to-human mutation does not affect the binding of any of the antibodies tested.

[0845] Relative binding to cyno-to-human variants suggests three epitope groups: The relative binding of the antibodies to cyno, human and hybrid PVRIG variants suggests 3 distinct epitope groups: Group 1 binds to R95/I97 residues (CPA.7.021 and CPA.7.028). Group 2 binds to S67 and R95/I97 residues (CPA.7.002 and CPA.7.041). Group 3 does not bind to S67 or R95/I97 residues (CPA.7.024 and CPA.7.050). The epitope groups show strong correlation to the degree of cyno cross-reactivity of these antibodies (FIG. 102).

### Summary and Conclusions

[0846] The restricted epitope mapping based on cyno-to-human variations in the PVRIG ECD identified S67, R95, and 197 residues as determinants of cyno cross-reactivity of anti-human PVRIG antibodies. The complete restoration of binding to L95R/T971 cyno PVRIG for CPA.7.021 and CPA.7.028 antibodies and improved binding of CPA.7.002 to this mutant strongly suggests that R95 and 197 residues are critical human PVRIG epitopes for these antibodies. These findings also suggest a possible way to predict cross-reactivity to non-human primate PVRIG orthologs based on their primary amino acid sequence.

1. A method of screening for inhibitors of the binding association of PVRIG polypeptide with PVLR2, said method comprising:
a) providing a surface comprising a first ligand protein comprising one of PVRIG polypeptide or PVLR2 polypeptide;
b) contacting said surface with a candidate agent under physiological conditions, wherein if said candidate agent binds to said first ligand protein it forms a first binding complex,
c) contacting said surface with a second ligand protein comprising the other of PVRIG polypeptide or PVLR2; and
d) determining whether said PVRIG polypeptide and said PVLR2 are bound as an indication of whether said candidate agent inhibits said binding association.

2. A method of screening for inhibitors of the binding association of PVRIG polypeptide with PVLR2, said method comprising:
a) providing a cell comprising an exogeneous recombinant nucleic acid encoding a human PVRIG polypeptide, wherein said cell expresses said human PVRIG polypeptide;
b) contacting said cell with a candidate agent and a labeled PVRL2 polypeptide;
c) determining whether said PVRIG polypeptide binds to PVLR2 as an indication of whether said candidate agent inhibits the binding of PVRIG polypeptide with PVLR2.

3. A method of screening for inhibitors of the binding association of PVRIG polypeptide with PVLR2, said method comprising:
a) providing a cell comprising an exogeneous recombinant nucleic acid encoding a human PVLR2 polypeptide, wherein said cell expresses said human PVLR2 polypeptide;
b) contacting said cell with a candidate agent and a labeled PVRIG polypeptide;
c) determining whether said PVLR2 polypeptide binds to PVRIG as an indication of whether said candidate agent inhibits the binding of PVRIG polypeptide with PVLR2.

4. A method of screening for inhibitors of the binding association of PVRIG polypeptide with PVLR2, said method comprising:
a) providing a test solution comprising:
i) a PVRIG polypeptide comprising a first FRET label;
ii) a PVLR2 polypeptide comprising a second FRET label;
c) providing a candidate agent;
d) detecting a FRET signal between said first and second label, wherein a difference in said FRET signal in the presence or absence of said candidate agent indicates that the candidate agent inhibits said binding association.

5. A method according to any of claims wherein a plurality of candidate agents are tested.

6. A method according to any of claims 1 to 5 wherein said candidate agent is a protein.

7. A method according to claim 6 wherein said protein is an anti-PVRIG antibody.

8. A method according to claim 6 wherein said protein comprises an extracellular domain (ECD) of PVRIG.

9. A method according to claim 8 wherein said protein is a fusion protein comprising said ECD and a fusion partner.

10. A method according to claim 9 wherein said fusion partner is selected from the group consisting of a human IgG Fc domain and a human serum albumin (HSA).

11. A method according to any of claims 1 to 10 wherein said method further comprises:
a) contacting said candidate agent with a population of cytotoxic T cells (CTLs) under conditions wherein said CTLs would normally be activated; and
b) determining the effect of said agent on said activation.

12. A method according to any of claims 1 to 10 wherein said method further comprises:
a) contacting said candidate agent with a population of cytotoxic T cells (CTLs); and b) determining the effect of said agent on IFNγ production.

13. A method according to any of claims 1 to 10 wherein said method further comprises:
a) contacting said candidate agent with a population of γδ T cells under conditions wherein said γδ T cells would normally be activated; and
b) determining the effect of said agent on said activation.

14. A method according to any of claims 1 to 10 wherein said method further comprises:
a) contacting said candidate agent with a population of Th1 cells under conditions wherein said Th1 cells would normally be activated; and
b) determining the effect of said agent on said activation.

15. A method according to any of claims 1 to 10 wherein said method further comprises:
a) contacting said candidate agent with a population of regulatory T cells (Tregs) under conditions and determining the effect of said agent on Treg cell number or activity.

16. A method according to claims 11 to 15 wherein said determination is done by measuring the presence or absence of increased expression of a protein selected from the group consisting of IFNg, TNFα, GM-CSF, CD25, CD137, CD69, PD1, CD107A, HLA-DR, IL-2, IL-6, IL-4, IL-5, IL-10 and IL-13, wherein increased expression is an indication of activation.

17. A method of treating a disorder associated with the interaction of PVRIG and PVLR2 comprising administering to a patient a composition comprising a stimulator of PVRIG to effect treatment.

18. A method according to claim 17 wherein said treatment is a decrease in immune response.

19. A method according to claim 17 wherein said treatment is a decrease in activation of αβ and/or γδ T cells.

20. A method according to claim 17 wherein said treatment is a decrease in cytotoxic T cell activity

21. A method according to claim 17 wherein said treatment is a decrease in NK and/or NKT cell activity.

22. A method according to claim 17 wherein said treatment is a decrease of αβ and/or γδ T-cell activity.

23. A method according to claim 17 wherein said treatment is a decrease in pro-inflammatory cytokine secretion

24. A method according to claim 17 wherein said treatment is a decrease in IL-2 secretion.

25. A method according to claim 17 wherein said treatment is a decrease in interferon-γ production.

26. A method according to claim 17 wherein said treatment is a decrease in Th1 response.

27. A method according to claim 17 wherein said treatment is a increase in Th2 response.

28. A method according to claim 17 wherein said treatment is an increase in inhibition of T cell activity.

29. A method according to claim 17 wherein said treatment is an increase in inhibition of CTL activity.

30. A method according to claim 17 wherein said treatment is an increase in inhibition of NK cell activity.

31. A method according to claim 17 wherein said treatment is an increase in αβ and/or γδ T cell exhaustion.

32. A method according to claim 17 wherein said treatment is a decrease in αβ and/or γδ T cell response.

33. A method according to claim 17 wherein said treatment is a decrease in activity of cytotoxic cells.

34. A method according to claim 17 wherein said treatment is a reduction in antigen-specific memory responses.

35. A method according to claim 17 wherein said treatment is an inhibition of apoptosis or lysis of cells.

36. A method according to claim 17 wherein said treatment is a decrease in cytotoxic or cytostatic effect on cells.

37. A method according to claim 17 wherein said treatment is a reduction in direct killing of cells.

38. A method according to claim 17 wherein said treatment is a decreases in Th17 activity.

39. A method according to claim 17 wherein said treatment is an reduction of complement dependent cytotoxicity and/or antibody dependent cell-mediated cytotoxicity.

40. A method according to any of claims 17 to 38 wherein said stimulator is selected from the group consisting of a protein and a nucleic acid.

41. A method according to claim 40 wherein said protein comprises an extracellular domain (ECD) of PVRIG.

42. A method according to claim 40 wherein said protein is a fusion protein comprising said ECD and a fusion partner.

43. A method according to claim 42 wherein said fusion partner is selected from the group consisting of a human IgG Fc domain and a human serum albumin (HSA).

44. A method according to any of claims 17 to 43 wherein said patient has an immune disorder.

45. A method according to 44 wherein said wherein said immune disorder is selected from the group consisting of an autoimmune disease, organ transplant rejection and inflammation.

46. A method according to claim 45 wherein said autoimmune disease is selected from the group consisting of rheumatoid arthritis, lupus, Inflammatory bowel disease, psoriasis, multiple sclerosis and diabetes type I.

47. A composition comprising an isolated PVRIG polypeptide consisting of a PVRIG polypeptide ECD domain having at least 95% identity to the ECD domain of an amino acid sequence selected from the group consisting of the sequences depicted in FIG. 67, FIG. 91 and FIGS. 92A to 92AT.

48. A composition according to claim 47 wherein said isolated PVRIG polypeptide has at least 99% identity to an amino acid sequence selected from the group consisting of the sequences depicted in FIG. 67, FIG. 91 and FIGS. 92A to 92AT.

49. A composition according to claim 47 wherein said isolated PVRIG polypeptide is selected from the group consisting of the sequences depicted in FIG. 67, FIG. 91 and FIGS. 92A to 92AT.

50. A composition comprising a PVRIG fusion polypeptide comprising:
a) an ECD from a PVRIG polypeptide; and
b) a covalently attached fusion partner moiety.

51. A composition according to claim 50 wherein said fusion partner moiety is selected from the group consisting of a human IgG Fc domain, a human serum albumin (HSA) and a polyethylene glycol (PEG).

52. A composition according to claim 50 wherein said ECD has an amino acid sequence selected from the group consisting of the sequences depicted in FIG. 67, FIG. 91 and FIGS. 92A to 92AT.

53. A composition according to claims 50 to 52 wherein said PVRIG polypeptide and said fusion partner moiety are directly covalently attached.

54. A composition according to claim 53 wherein said fusion partner moiety is a polyethylene glycol (PEG) moiety.

55. A composition according to claims 50 to 52 wherein said PVRIG polypeptide and said fusion partner moiety are covalently attached using an exogeneous linker.

56. A composition according to claim 55 wherein said exogeneous linker is selected from the group consisting of those depicted in FIG. 93.

57. A composition according to claim 55 or 56 wherein said exogenous linker has the formula (GGGS)n, wherein n is from 1 to 5.

58. A composition according to any of claims 50 to 53 and 55 to 57 wherein said fusion partner moiety is a human serum albumin (HSA).

59. A composition according to any of claims 50 to 53 and 55 to 57 wherein said fusion partner moiety is an Fc domain.

60. A composition according to claim 59 wherein said Fc domain is a human IgG Fc domain.

61. A composition according to claim 60 wherein said human IgG Fc domain is selected from the group consisting of the Fc domain of human IgG1, the Fc domain of human IgG2, the Fc domain of human IgG3 and the Fc domain of human IgG4.

62. A composition according to claim 59 wherein said Fc domain is a variant human Fc domain from IgG1 or IgG2.

63. A composition according to any of claims 50 to 62 further comprising a pharmaceutically acceptable carrier.

64. A method of suppressing T cell activation of a patient comprising administering a composition according to any of claims 50 to 63 to said patient such that said patient's immune response is suppressed as a result of treatment.

65. A method according to claim 64 wherein said patient has an immune disorder.

66. A method according to claim 65 wherein said immune disorder is selected from the group consisting of an autoimmune disease, and organ transplant rejection.

67. A method according to claim 66 wherein said autoimmune disease is selected from the group consisting of rheumatoid arthritis, lupus, Inflammatory bowel disease, psoriasis, multiple sclerosis, Diabetes type I.

The application's sequence listing, which the Patent Office published only in electronic form, follows.

SEQUENCE LISTING (1588 sequences)

SEQ ID NO: 1 - protein, 20 aa, Artificial Sequence
  Description of Artificial Sequence: Synthetic peptide
  MISC_FEATURE (1)..(20): This sequence may encompass 1-5 "Gly-Gly-Gly-Ser" repeating units
GGGSGGGSGGGSGGGSGGGS

SEQ ID NO: 2 - protein, 7 aa, Artificial Sequence
  Description of Artificial Sequence: Synthetic peptide
ENLYFQG

SEQ ID NO: 3 - protein, 11 aa, Artificial Sequence
  Description of Artificial Sequence: Synthetic peptide
GSENLYFQGSG

SEQ ID NO: 4 - protein, 26 aa, Artificial Sequence
  Description of Artificial Sequence: Synthetic peptide
  MISC_FEATURE (1)..(25): This region may encompass 1-5 "Glu-Ala-Ala-Ala-Lys" repeating units
EAAAKEAAAKEAAAKEAAAKEAAAKA

SEQ ID NO: 5 - protein, 232 aa, Artificial Sequence
  Description of Artificial Sequence: Synthetic polypeptide
EPKSCDKTHTCPPCPAPELLGGPSVFLFPPKPKDTLMISRTPEVTCVVVDVSHEDPEVKFNWYVDGVEVHNAKTKPREEQYNSTYRVVSVLTVLHQDWLNGKEYKCKVSNKALPAPIEKTISKAKGQPREPQVYTLPPSRDELTKNQVSLTCLVKGFYPSDIAVEWESNGQPENNYKTTPPVLDSDGSFFLYSKLTVDKSRWQQGNVFSCSVMHEALHNHYTQKSLSLSPGK

SEQ ID NO: 6 - protein, 217 aa, Artificial Sequence
  Description of Artificial Sequence: Synthetic polypeptide
APELLGGPSVFLFPPKPKDTLMISRTPEVTCVVVDVSHEDPEVKFNWYVDGVEVHNAKTKPREEQYNSTYRVVSVLTVLHQDWLNGKEYKCKVSNKALPAPIEKTISKAKGQPREPQVYTLPPSRDELTKNQVSLTCLVKGFYPSDIAVEWESNGQPENNYKTTPPVLDSDGSFFLYSKLTVDKSRWQQGNVFSCSVMHEALHNHYTQKSLSLSPGK

SEQ ID NO: 7 - protein, 233 aa, Artificial Sequence
  Description of Artificial Sequence: Synthetic polypeptide
EPRGPTIKPCPPCKCPAPNLLGGPSVFIFPPKIKDVLMISLSPIVTCVVVDVSEDDPDVQISWFVNNVEVHTAQTQTHREDYNSTLRVVSALPIQHQDWMSGKEFKCKVNNKDLPAPIERTISKPKGSVRAPQVYVLPPPEEEMTKKQVTLTCMVTDFMPEDIYVEWTNNGKTELNYKNTEPVLDSDGSYFMYSKLRVEKKNWVERNSYSCSVVHEGLHNHHTTKSFSRTPGK

SEQ ID NO: 8 - protein, 204 aa, Homo sapiens
MGHRTLVLPWVLLTLCVTAGTPEVWVQVRMEATELSSFTIRCGFLGSGSISLVTVSWGGPNGAGGTTLAVLHPERGIRQWAPARQARWETQSSISLILEGSGASSPCANTTFCCKFASFPEGSWEACGSLPPSSDPGLSAPPTPAPILRADLAGILGVSGVLLFGCVYLLHLLRRHKHRPAPRLQPSRTSPQAPRARAWAPSQA

SEQ ID NO: 9 - protein, 224 aa, Homo sapiens
MRTEAQVPALQPPEPGLEGAMGHRTLVLPWVLLTLCVTAGTPEVWVQVRMEATELSSFTIRCGFLGSGSISLVTVSWGGPNGAGGTTLAVLHPERGIRQWAPARQARWETQSSISLILEGSGASSPCANTTFCCKFASFPEGSWEACGSLPPSSDPGLSAPPTPAPILRADLAGILGVSGVLLFGCVYLLHLLRRHKHRPAPRLQPSRTSPQAPRARAWAPSQA

SEQ ID NO: 10 - protein, 19 aa, Artificial Sequence
  Description of Artificial Sequence: Synthetic peptide
MGWSCIILFLVATATGVHS

SEQ ID NO: 11 - protein, 382 aa, Artificial Sequence
  Description of Artificial Sequence: Synthetic polypeptide
MGWSCIILFLVATATGVHSTPEVWVQVRMEATELSSFTIRCGFLGSGSISLVTVSWGGPNGAGGTTLAVLHPERGIRQWAPARQARWETQSSISLILEGSGASSPCANTTFCCKFASFPEGSWEACGSLPPSSDPGLSAPPTPAPILRADEPKSSDKTHTSPPSPAPELLGGPSVFLFPPKPKDTLMISRTPEVTCVVVDVSHEDPEVKFNWYVDGVEVHNAKTKPREEQYNSTYRVVSVLTVLHQDWLNGKEYKCKVSNKALPAPIEKTISKAKGQPREPQVYTLPPSRDELTKNQVSLTCLVKGFYPSDIAVEWESNGQPENNYKTTPPVLDSDGSFFLYSKLTVDKSRWQQGNVFSCSVMHEALHNHYTQKSLSLSPGK

SEQ ID NO: 12 - protein, 479 aa, Homo sapiens
MARAAALLPSRSPPTPLLWPLLLLLLLETGAQDVRVQVLPEVRGQLGGTVELPCHLLPPVPGLYISLVTWQRPDAPANHQNVAAFHPKMGPSFPSPKPGSERLSFVSAKQSTGQDTEAELQDATLALHGLTVEDEGNYTCEFATFPKGSVRGMTWLRVIAKPKNQAEAQKVTFSQDPTTVALCISKEGRPPARISWLSSLDWEAKETQVSGTLAGTVTVTSRFTLVPSGRADGVTVTCKVEHESFEEPALIPVTLSVRYPPEVSISGYDDNWYLGRTDATLSCDVRSNPEPTGYDWSTTSGTFPTSAVAQGSQLVIHAVDSLFNTTFVCTVTNAVGMGRAEQVIFVRETPRASPRDVGPLVWGAVGGTLLVLLLLAGGSLAFILLRVRRRRKSPGGAGGGASGDGGFYDPKAQVLGNGDPVFWTPVVPGPMEPDGKDEEEEEEEEKAEKGLMLPPPPALEDDMESQLDGSLISRRAVYV

SEQ ID NO: 13 - protein, 518 aa, Homo sapiens
MARAAALLPSRSPPTPLLWPLLLLLLLETGAQDVRVQVLPEVRGQLGGTVELPCHLLPPVPGLYISLVTWQRPDAPANHQNVAAFHPKMGPSFPSPKPGSERLSFVSAKQSTGQDTEAELQDATLALHGLTVEDEGNYTCEFATFPKGSVRGMTWLRVIAKPKNQAEAQKVTFSQDPTTVALCISKEGRPPARISWLSSLDWEAKETQVSGTLAGTVTVTSRFTLVPSGRADGVTVTCKVEHESFEEPALIPVTLSVRYPPEVSISGYDDNWYLGRTDATLSCDVRSNPEPTGYDWSTTSGTFPTSAVAQGSQLVIHAVDSLFNTTFVCTVTNAVGMGRAEQVIFVRETPNTAGAGATGGIIGGIIAAIIATAVAATGILICRQQRKEQTLQGAEEDEDLEGPPSYKPPTPKAKLEAQEMPSQLFTLGASEHSPLKTPYFDAGASCTEQEMPRYHELPTLEERSGPLHPGATSLGSPIPVPPGPPAVEDVSLDLEDEEGEEEEEYLDKINPIYDALSY

SEQ ID NO: 14 - protein, 8 aa, Artificial Sequence
  Description of Artificial Sequence: Synthetic peptide
GGTFSSYA

SEQ ID NO: 15 - protein, 8 aa, Artificial Sequence
  Description of Artificial Sequence: Synthetic peptide
IIPIFGTA

SEQ ID NO: 16 - protein, 13 aa, Artificial Sequence
  Description of Artificial Sequence: Synthetic peptide
AREEVSSPYGMDV

SEQ ID NO: 17 - protein, 9 aa, Artificial Sequence
  Description of Artificial Sequence: Synthetic peptide
TGAVTSGHY

SEQ ID NO: 18 - protein, 3 aa, Artificial Sequence
  Description of Artificial Sequence: Synthetic peptide
DTG

SEQ ID NO: 19 - protein, 10 aa, Artificial Sequence
  Description of Artificial Sequence: Synthetic peptide
LLSYSGASWV

SEQ ID NO: 20 - protein, 8 aa, Artificial Sequence
  Description of Artificial Sequence: Synthetic peptide
GFSLSHFS

SEQ ID NO: 21 - protein, 8 aa, Artificial Sequence
  Description of Artificial Sequence: Synthetic peptide
FDPEEGGT

SEQ ID NO: 22 - protein, 14 aa, Artificial Sequence
  Description of Artificial Sequence: Synthetic peptide
ATGIWYSSGWPVDY

SEQ ID NO: 23 - protein, 11 aa, Artificial Sequence
  Description of Artificial Sequence: Synthetic peptide
QSLLDSSGYNY

SEQ ID NO: 24 - protein, 3 aa, Artificial Sequence
  Description of Artificial Sequence: Synthetic peptide
LGS

SEQ ID NO: 25 - protein, 9 aa, Artificial Sequence
  Description of Artificial Sequence: Synthetic peptide
MQALQTPIT

SEQ ID NO: 26 - protein, 8 aa, Artificial Sequence
  Description of Artificial Sequence: Synthetic peptide
GYTLTELS

SEQ ID NO: 27 - protein, 8 aa, Artificial Sequence
  Description of Artificial Sequence: Synthetic peptide
FDPEDGET

SEQ ID NO: 28 - protein, 18 aa, Artificial Sequence
  Description of Artificial Sequence: Synthetic peptide
ATVSRVRGVINYYYYMDV

SEQ ID NO: 29 - protein, 11 aa, Artificial Sequence
  Description of Artificial Sequence: Synthetic peptide
QSLLYRNGNNY

SEQ ID NO: 30 - protein, 3 aa, Artificial Sequence
  Description of Artificial Sequence: Synthetic peptide
LGS

SEQ ID NO: 31 - protein, 9 aa, Artificial Sequence
  Description of Artificial Sequence: Synthetic peptide
MQALQTPPT

SEQ ID NO: 32 - protein, 8 aa, Artificial Sequence
  Description of Artificial Sequence: Synthetic peptide
GGTFGTYA

SEQ ID NO: 33 - protein, 8 aa, Artificial Sequence
  Description of Artificial Sequence: Synthetic peptide
ITPISATI

SEQ ID NO: 34 - protein, 13 aa, Artificial Sequence
  Description of Artificial Sequence: Synthetic peptide
ARGFEYSDGLLDD

SEQ ID NO: 35 - protein, 12 aa, Artificial Sequence
  Description of Artificial Sequence: Synthetic peptide
QSLFYSDDGNTY

SEQ ID NO: 36 - protein, 3 aa, Artificial Sequence
  Description of Artificial Sequence: Synthetic peptide
RLS

SEQ ID NO: 37 - protein, 9 aa, Artificial Sequence
  Description of Artificial Sequence: Synthetic peptide
MQHMEFPLT

SEQ ID NO: 38 - protein, 9 aa, Artificial Sequence
  Description of Artificial Sequence: Synthetic peptide
SGSISSTNW

SEQ ID NO: 39 - protein, 7 aa, Artificial Sequence
  Description of Artificial Sequence: Synthetic peptide
IYHSGST

SEQ ID NO: 40 - protein, 10 aa, Artificial Sequence
  Description of Artificial Sequence: Synthetic peptide
ARVGPAAIYY

SEQ ID NO: 41 - protein, 8 aa, Artificial Sequence
  Description of Artificial Sequence: Synthetic peptide
SNNVGYEG

SEQ ID NO: 42 - protein, 3 aa, Artificial Sequence
  Description of Artificial Sequence: Synthetic peptide
RNN

SEQ ID NO: 43 - protein, 11 aa, Artificial Sequence
  Description of Artificial Sequence: Synthetic peptide
SAWDSSLNAVV

SEQ ID NO: 44 - protein, 8 aa, Artificial Sequence
  Description of Artificial Sequence: Synthetic peptide
GYTLTELS

SEQ ID NO: 45 - protein, 8 aa, Artificial Sequence
  Description of Artificial Sequence: Synthetic peptide
FDPEDGET

SEQ ID NO: 46 - protein, 21 aa, Artificial Sequence
  Description of Artificial Sequence: Synthetic peptide
ATAKPGIAVAGQNYYYYYMDV

SEQ ID NO: 47 - protein, 11 aa, Artificial Sequence
  Description of Artificial Sequence: Synthetic peptide
QSLLYRNGNNY

SEQ ID NO: 48 - protein, 3 aa, Artificial Sequence
  Description of Artificial Sequence: Synthetic peptide
LGS

SEQ ID NO: 49 - protein, 9 aa, Artificial Sequence
  Description of Artificial Sequence: Synthetic peptide
MQALQTPPT

SEQ ID NO: 50 - protein, 8 aa, Artificial Sequence
  Description of Artificial Sequence: Synthetic peptide
GFTFSSYA

SEQ ID NO: 51 - protein, 8 aa, Artificial Sequence
  Description of Artificial Sequence: Synthetic peptide
ISYDGSNK

SEQ ID NO: 52 - protein, 17 aa, Artificial Sequence
  Description of Artificial Sequence: Synthetic peptide
ASSPIGYSYGYWGGMDV

SEQ ID NO: 53 - protein, 9 aa, Artificial Sequence
  Description of Artificial Sequence: Synthetic peptide
SGIDVRTNK

SEQ ID NO: 54 - protein, 7 aa, Artificial Sequence
  Description of Artificial Sequence: Synthetic peptide
FQSDSDK

SEQ ID NO: 55 - protein, 9 aa, Artificial Sequence
  Description of Artificial Sequence: Synthetic peptide
LIWHTSGWV

SEQ ID NO: 56 - protein, 8 aa, Artificial Sequence
  Description of Artificial Sequence: Synthetic peptide
GYTLTELS

SEQ ID NO: 57 - protein, 8 aa, Artificial Sequence
  Description of Artificial Sequence: Synthetic peptide
FDPEDGET

SEQ ID NO: 58 - protein, 17 aa, Artificial Sequence
  Description of Artificial Sequence: Synthetic peptide
ATGPAAAGVGYYYYMDV

SEQ ID NO: 59 - protein, 11 aa, Artificial Sequence
  Description of Artificial Sequence: Synthetic peptide
QSLLYRNGYNY

SEQ ID NO: 60 - protein, 3 aa, Artificial Sequence
  Description of Artificial Sequence: Synthetic peptide
LGS

SEQ ID NO: 61 - protein, 9 aa, Artificial Sequence
  Description of Artificial Sequence: Synthetic peptide
MQALQTPPT

SEQ ID NO: 62 - protein, 8 aa, Artificial Sequence
  Description of Artificial Sequence: Synthetic peptide
GFTFSSYA

SEQ ID NO: 63 - protein, 8 aa, Artificial Sequence
  Description of Artificial Sequence: Synthetic peptide
ISYDGSNK

SEQ ID NO: 64 - protein, 20 aa, Artificial Sequence
  Description of Artificial Sequence: Synthetic peptide
ARDVMVYCSSTSCYFYGMDV

SEQ ID NO: 65 - protein, 6 aa, Artificial Sequence
  Description of Artificial Sequence: Synthetic peptide
QDIRDY

SEQ ID NO: 66 - protein, 3 aa, Artificial Sequence
  Description of Artificial Sequence: Synthetic peptide
DAS

SEQ ID NO: 67 - protein, 9 aa, Artificial Sequence
  Description of Artificial Sequence: Synthetic peptide
QQFENLPIT

SEQ ID NO: 68 - protein, 8 aa, Artificial Sequence
  Description of Artificial Sequence: Synthetic peptide
GYTLTELS

SEQ ID NO: 69 - protein, 8 aa, Artificial Sequence
  Description of Artificial Sequence: Synthetic peptide
FDPEDGET

SEQ ID NO: 70 - protein, 18 aa, Artificial Sequence
  Description of Artificial Sequence: Synthetic peptide
ATGGYSSGFNYYYYYMDV

SEQ ID NO: 71 - protein, 11 aa, Artificial Sequence
  Description of Artificial Sequence: Synthetic peptide
QSLLYRNGNNY

SEQ ID NO: 72 - protein, 3 aa, Artificial Sequence
  Description of Artificial Sequence: Synthetic peptide
LGS

SEQ ID NO: 73 - protein, 9 aa, Artificial Sequence
  Description of Artificial Sequence: Synthetic peptide
MQALQTPPT

SEQ ID NO: 74 - protein, 8 aa, Artificial Sequence
  Description of Artificial Sequence: Synthetic peptide
GYTLTELS

SEQ ID NO: 75 - protein, 8 aa, Artificial Sequence
  Description of Artificial Sequence: Synthetic peptide
FDPEDGET

SEQ ID NO: 76 - protein, 14 aa, Artificial Sequence
  Description of Artificial Sequence: Synthetic peptide
ATGVTTYYYYGMDV

SEQ ID NO: 77 - protein, 11 aa, Artificial Sequence
  Description of Artificial Sequence: Synthetic peptide
QSLLYSNGNNF

SEQ ID NO: 78 - protein, 3 aa, Artificial Sequence
  Description of Artificial Sequence: Synthetic peptide
LGS

SEQ ID NO: 79 - protein, 9 aa, Artificial Sequence
  Description of Artificial Sequence: Synthetic peptide
MQALQTPPT

SEQ ID NO: 80 - protein, 8 aa, Artificial Sequence
  Description of Artificial Sequence: Synthetic peptide
GFTFSSYG

SEQ ID NO: 81 - protein, 8 aa, Artificial Sequence
  Description of Artificial Sequence: Synthetic peptide
IRYDGSNK

SEQ ID NO: 82 - protein, 14 aa, Artificial Sequence
  Description of Artificial Sequence: Synthetic peptide
ARDLFDFWWDGMDV

SEQ ID NO: 83 - protein, 7 aa, Artificial Sequence
  Description of Artificial Sequence: Synthetic peptide
QSVSSMY

SEQ ID NO: 84 - protein, 3 aa, Artificial Sequence
  Description of Artificial Sequence: Synthetic peptide
GAS

SEQ ID NO: 85 - protein, 10 aa, Artificial Sequence
  Description of Artificial Sequence: Synthetic peptide
QQYVSSPMYT

SEQ ID NO: 86 - protein, 8 aa, Artificial Sequence
  Description of Artificial Sequence: Synthetic peptide
GGTFNNYG

SEQ ID NO: 87 - protein, 8 aa, Artificial Sequence
  Description of Artificial Sequence: Synthetic peptide
IIPLFGTT

SEQ ID NO: 88 - protein, 15 aa, Artificial Sequence
  Description of Artificial Sequence: Synthetic peptide
ARDRMAADGMAVFDY

SEQ ID NO: 89 - protein, 8 aa, Artificial Sequence
  Description of Artificial Sequence: Synthetic peptide
SSNIGRHF

SEQ ID NO: 90 - protein, 3 aa, Artificial Sequence
  Description of Artificial Sequence: Synthetic peptide
KND

SEQ ID NO: 91 - protein, 11 aa, Artificial Sequence
  Description of Artificial Sequence: Synthetic peptide
SSWDAALNGVV

SEQ ID NO: 92 - protein, 8 aa, Artificial Sequence
  Description of Artificial Sequence: Synthetic peptide
GYTLTELS

SEQ ID NO: 93 - protein, 8 aa, Artificial Sequence
  Description of Artificial Sequence: Synthetic peptide
FDPEDGET

SEQ ID NO: 94 - protein, 19 aa, Artificial Sequence
  Description of Artificial Sequence: Synthetic peptide
ATEVPMVRGARRYYYYMDV

SEQ ID NO: 95 - protein, 11 aa, Artificial Sequence
  Description of Artificial Sequence: Synthetic peptide
QTLLYINENNY

SEQ ID NO: 96 - protein, 3 aa, Artificial Sequence
  Description of Artificial Sequence: Synthetic peptide
LGS

SEQ ID NO: 97 - protein, 9 aa, Artificial Sequence
  Description of Artificial Sequence: Synthetic peptide
MQGLQTPPT

SEQ ID NO: 98 - protein, 10 aa, Artificial Sequence
  Description of Artificial Sequence: Synthetic peptide
GGSISNSNYY

SEQ ID NO: 99 - protein, 7 aa, Artificial Sequence
  Description of Artificial Sequence: Synthetic peptide
IYYSGST

SEQ ID NO: 100 - protein, 15 aa, Artificial Sequence
  Description of Artificial Sequence: Synthetic peptide
ARGAWELSLGDWFDP

SEQ ID NO: 101 - protein, 9 aa, Artificial Sequence
  Description of Artificial Sequence: Synthetic peptide
SSNIGAGYD

SEQ ID NO: 102 - protein, 3 aa, Artificial Sequence
  Description of Artificial Sequence: Synthetic peptide
GNN

SEQ ID NO: 103 - protein, 12 aa, Artificial Sequence
  Description of Artificial Sequence: Synthetic peptide
QSYDSSLSVYVV

SEQ ID NO: 104 - protein, 8 aa, Artificial Sequence
  Description of Artificial Sequence: Synthetic peptide
GFTFGTSS

SEQ ID NO: 105 - protein, 8 aa, Artificial Sequence
  Description of Artificial Sequence: Synthetic peptide
ISFDGTEI

SEQ ID NO: 106 - protein, 15 aa, Artificial Sequence
  Description of Artificial Sequence: Synthetic peptide
AKGSGNIYFYSGMDV

SEQ ID NO: 107 - protein, 6 aa, Artificial Sequence
  Description of Artificial Sequence: Synthetic peptide
QSISGW

SEQ ID NO: 108 - protein, 3 aa, Artificial Sequence
  Description of Artificial Sequence: Synthetic peptide
ETS

SEQ ID NO: 109 - protein, 9 aa, Artificial Sequence
  Description of Artificial Sequence: Synthetic peptide
QQYYSYPLT

SEQ ID NO: 110 - protein, 8 aa, Artificial Sequence
  Description of Artificial Sequence: Synthetic peptide
GYTLTELS

SEQ ID NO: 111 - protein, 8 aa, Artificial Sequence
  Description of Artificial Sequence: Synthetic peptide
FDPEDGET

SEQ ID NO: 112 - protein, 19 aa, Artificial Sequence
  Description of Artificial Sequence: Synthetic peptide
ATGVPAAIGVYYYYYYMDV

SEQ ID NO: 113 - protein, 11 aa, Artificial Sequence
  Description of Artificial Sequence: Synthetic peptide
QSLLYSNGYNY

SEQ ID NO: 114 - protein, 3 aa, Artificial Sequence
  Description of Artificial Sequence: Synthetic peptide
LGS

SEQ ID NO: 115 - protein, 9 aa, Artificial Sequence
  Description of Artificial Sequence: Synthetic peptide
MQALQSPVT

SEQ ID NO: 116 - protein, 8 aa, Artificial Sequence
  Description of Artificial Sequence: Synthetic peptide
GYTLTELS

SEQ ID NO: 117 - protein, 8 aa, Artificial Sequence
  Description of Artificial Sequence: Synthetic peptide
FDPEDGET

SEQ ID NO: 118 - protein, 20 aa, Artificial Sequence
  Description of Artificial Sequence: Synthetic peptide
ATDSRDGPAARGGYYYYMDV

SEQ ID NO: 119 - protein, 11 aa, Artificial Sequence
  Description of Artificial Sequence: Synthetic peptide
QSLLYINGYNY

SEQ ID NO: 120 - protein, 3 aa, Artificial Sequence
  Description of Artificial Sequence: Synthetic peptide
LGS

SEQ ID NO: 121 - protein, 9 aa, Artificial Sequence
  Description of Artificial Sequence: Synthetic peptide
MQALQTPPT

SEQ ID NO: 122 - protein, 8 aa, Artificial Sequence
  Description of Artificial Sequence: Synthetic peptide
GGTFSSYA

SEQ ID NO: 123 - protein, 8 aa, Artificial Sequence
  Description of Artificial Sequence: Synthetic peptide
IIPIFGTA

SEQ ID NO: 124 - protein, 20 aa, Artificial Sequence
  Description of Artificial Sequence: Synthetic peptide
ARDAYYYDSSGYYNPDAFDI

SEQ ID NO: 125 - protein, 11 aa, Artificial Sequence
  Description of Artificial Sequence: Synthetic peptide
QSLLHSNGYNY

SEQ ID NO: 126 - protein, 3 aa, Artificial Sequence
  Description of Artificial Sequence: Synthetic peptide
LGS

SEQ ID NO: 127 - protein, 9 aa, Artificial Sequence
  Description of Artificial Sequence: Synthetic peptide
MQGLQTPRT

SEQ ID NO: 128 - protein, 8 aa, Artificial Sequence
  Description of Artificial Sequence: Synthetic peptide
GGTFSSSA

SEQ ID NO: 129 - protein, 8 aa, Artificial Sequence
  Description of Artificial Sequence: Synthetic peptide
IIPIYGIT

SEQ ID NO: 130 - protein, 22 aa, Artificial Sequence
  Description of Artificial Sequence: Synthetic peptide
ARDDTARRVRGVPYYYYYAMDV

SEQ ID NO: 131 - protein, 6 aa, Artificial Sequence
  Description of Artificial Sequence: Synthetic peptide
QDIDDD

SEQ ID NO: 132 - protein, 3 aa, Artificial Sequence
  Description of Artificial Sequence: Synthetic peptide
EAS

SEQ ID NO: 133 - protein, 9 aa, Artificial Sequence
  Description of Artificial Sequence: Synthetic peptide
LQHDNLPLT

SEQ ID NO: 134 - protein, 8 aa, Artificial Sequence
  Description of Artificial Sequence: Synthetic peptide
GYTLTELS

SEQ ID NO: 135 - protein, 8 aa, Artificial Sequence
  Description of Artificial Sequence: Synthetic peptide
FDPEDGET

SEQ ID NO: 136 - protein, 19 aa, Artificial Sequence
  Description of Artificial Sequence: Synthetic peptide
ATEDPGPVAGPYYYYGMDV

SEQ ID NO: 137 - protein, 11 aa, Artificial Sequence
  Description of Artificial Sequence: Synthetic peptide
QSLLYINGYHY

SEQ ID NO: 138 - protein, 3 aa, Artificial Sequence
  Description of Artificial Sequence: Synthetic peptide
LGS

SEQ ID NO: 139 - protein, 9 aa, Artificial Sequence
  Description of Artificial Sequence: Synthetic peptide
MQALQTPPT

SEQ ID NO: 140 - protein, 8 aa, Artificial Sequence
  Description of Artificial Sequence: Synthetic peptide
GGTFSSSA

SEQ ID NO: 141 - protein, 8 aa, Artificial Sequence
  Description of Artificial Sequence: Synthetic peptide
IIPIYGIT

SEQ ID NO: 142 - protein, 22 aa, Artificial Sequence
  Description of Artificial Sequence: Synthetic peptide
ARDDTARRVRGVPYYYYYAMDV

SEQ ID NO: 143 - protein, 12 aa, Artificial Sequence
  Description of Artificial Sequence: Synthetic peptide
QSLLDSDDGNTY

SEQ ID NO: 144 - protein, 3 aa, Artificial Sequence
  Description of Artificial Sequence: Synthetic peptide
TLS

SEQ ID NO: 145 - protein, 9 aa, Artificial Sequence
  Description of Artificial Sequence: Synthetic peptide
MQRLQFPLT

SEQ ID NO: 146 - protein, 8 aa, Artificial Sequence
  Description of Artificial Sequence: Synthetic peptide
GYTLTELS

SEQ ID NO: 147 - protein, 8 aa, Artificial Sequence
  Description of Artificial Sequence: Synthetic peptide
FDPEDGET

SEQ ID NO: 148 - protein, 19 aa, Artificial Sequence
  Description of Artificial Sequence: Synthetic peptide
ATGVPAAIGVYYYYYYMDV

SEQ ID NO: 149 - protein, 11 aa, Artificial Sequence
  Description of Artificial Sequence: Synthetic peptide
QSLLYRNGYNY

SEQ ID NO: 150 - protein, 3 aa, Artificial Sequence
  Description of Artificial Sequence: Synthetic peptide
WGS

SEQ ID NO: 151 - protein, 9 aa, Artificial Sequence
  Description of Artificial Sequence: Synthetic peptide
MQAVQNPPT

SEQ ID NO: 152 - protein, 8 aa, Artificial Sequence
  Description of Artificial Sequence: Synthetic peptide
GGTFSSSA

SEQ ID NO: 153 - protein, 8 aa, Artificial Sequence
  Description of Artificial Sequence: Synthetic peptide
IIPIYGIT

SEQ ID NO: 154 - protein, 22 aa, Artificial Sequence
  Description of Artificial Sequence: Synthetic peptide
ARDDTARRVRGVPYYYYYAMDV

SEQ ID NO: 155 - protein, 6 aa, Artificial Sequence
  Description of Artificial Sequence: Synthetic peptide
QTMNNY

SEQ ID NO: 156 - protein, 3 aa, Artificial Sequence
  Description of Artificial Sequence: Synthetic peptide
DAS

SEQ ID NO: 157 - protein, 10 aa, Artificial Sequence
  Description of Artificial Sequence: Synthetic peptide
QQYGDWLPIT

SEQ ID NO: 158 - protein, 8 aa, Artificial Sequence
  Description of Artificial Sequence: Synthetic peptide
GYTLTELS

SEQ ID NO: 159 - protein, 8 aa, Artificial Sequence
  Description of Artificial Sequence: Synthetic peptide
FDPEDGET

SEQ ID NO: 160 - protein, 17 aa, Artificial Sequence
  Description of Artificial Sequence: Synthetic peptide
ATAFPEATISYYYYMDV

SEQ ID NO: 161 - protein, 11 aa, Artificial Sequence
  Description of Artificial Sequence: Synthetic peptide
QSLLYRNGYNY

SEQ ID NO: 162 - protein, 3 aa, Artificial Sequence
  Description of Artificial Sequence: Synthetic peptide
WGS

SEQ ID NO: 163 - protein, 9 aa, Artificial Sequence
  Description of Artificial Sequence: Synthetic peptide
MQAVQNPPT

SEQ ID NO: 164 - protein, 8 aa, Artificial Sequence
  Description of Artificial Sequence: Synthetic peptide
GGTFSSSA

SEQ ID NO: 165 - protein, 8 aa, Artificial Sequence
  Description of Artificial Sequence: Synthetic peptide
IIPIYGIT

SEQ ID NO: 166 - protein, 22 aa, Artificial Sequence
  Description of Artificial Sequence: Synthetic peptide
ARDDTARRVRGVPYYYYYAMDV

SEQ ID NO: 167 - protein, 12 aa, Artificial Sequence
  Description of Artificial Sequence: Synthetic peptide
RSLLDSDDGNTH

SEQ ID NO: 168 - protein, 3 aa, Artificial Sequence
  Description of Artificial Sequence: Synthetic peptide
SLS

SEQ ID NO: 169 - protein, 9 aa, Artificial Sequence
  Description of Artificial Sequence: Synthetic peptide
MQRKEFPLT

SEQ ID NO: 170 - protein, 8 aa, Artificial Sequence
  Description of Artificial Sequence: Synthetic peptide
GGTFSSYA

SEQ ID NO: 171 - protein, 8 aa, Artificial Sequence
  Description of Artificial Sequence: Synthetic peptide
IIPIFGTA

SEQ ID NO: 172 - protein, 21 aa, Artificial Sequence
  Description of Artificial Sequence: Synthetic peptide
ARGPWYYDSSGYSSYAYYMDV

SEQ ID NO: 173 - protein, 11 aa, Artificial Sequence
  Description of Artificial Sequence: Synthetic peptide
QSLLHSDGYNY

SEQ ID NO: 174 - protein, 3 aa, Artificial Sequence
  Description of Artificial Sequence: Synthetic peptide
LGS

SEQ ID NO: 175 - protein, 10 aa, Artificial Sequence
  Description of Artificial Sequence: Synthetic peptide
MQALHTPGVT

SEQ ID NO: 176 - protein, 120 aa, Artificial Sequence
  Description of Artificial Sequence: Synthetic polypeptide
QMQLVQSGAEVKKPGSSVKVSCKASGGTFSSYAISWVRQAPGQGLEWMGGIIPIFGTANYAQKFQGRVTITADESTSTAYMELSSLRSEDTAVYYCAREEVSSPYGMDVWGQGTTVTVSS

SEQ ID NO: 177 - protein, 8 aa, Artificial Sequence
  Description of Artificial Sequence: Synthetic peptide
GGTFSSYA

SEQ ID NO: 178 - protein, 8 aa, Artificial Sequence
  Description of Artificial Sequence: Synthetic peptide
IIPIFGTA

SEQ ID NO: 179 - protein, 13 aa, Artificial Sequence
  Description of Artificial Sequence: Synthetic peptide
AREEVSSPYGMDV

SEQ ID NO: 180 - protein, 450 aa, Artificial Sequence
  Description of Artificial Sequence: Synthetic polypeptide
QMQLVQSGAEVKKPGSSVKVSCKASGGTFSSYAISWVRQAPGQGLEWMGGIIPIFGTANYAQKFQGRVTITADESTSTAYMELSSLRSEDTAVYYCAREEVSSPYGMDVWGQGTTVTVSSASTKGPSVFPLAPSSKSTSGGTAALGCLVKDYFPEPVTVSWNSGALTSGVHTFPAVLQSSGLYSLSSVVTVPSSSLGTQTYICNVNHKPSNTKVDKKVEPKSCDKTHTCPPCPAPELLGGPSVFLFPPKPKDTLMISRTPEVTCVVVDVSHEDPEVKFNWYVDGVEVHNAKTKPREEQYNSTYRVVSVLTVLHQDWLNGKEYKCKVSNKALPAPIEKTISKAKGQPREPQVYTLPPSREEMTKNQVSLTCLVKGFYPSDIAVEWESNGQPENNYKTTPPVLDSDGSFFLYSKLTVDKSRWQQGNVFSCSVMHEALHNHYTQKSLSLSPGK

SEQ ID NO: 181 - protein, 111 aa, Artificial Sequence
  Description of Artificial Sequence: Synthetic polypeptide
QAVVTQEPSLTVSPGGTVTLTCGTSTGAVTSGHYPYWFQQKPGQAPKTLIYDTGNKHSWTPARFSGSLLGGKAALTLSGAQPEDEADYYCLLSYSGASWVFGGGTKLTVLG

SEQ ID NO: 182 - protein, 9 aa, Artificial Sequence
  Description of Artificial Sequence: Synthetic peptide
TGAVTSGHY

SEQ ID NO: 183 - protein, 3 aa, Artificial Sequence
  Description of Artificial Sequence: Synthetic peptide
DTG

SEQ ID NO: 184 - protein, 10 aa, Artificial Sequence
  Description of Artificial Sequence: Synthetic peptide
LLSYSGASWV

SEQ ID NO: 185 - protein, 216 aa, Artificial Sequence
  Description of Artificial Sequence: Synthetic polypeptide
QAVVTQEPSLTVSPGGTVTLTCGTSTGAVTSGHYPYWFQQKPGQAPKTLIYDTGNKHSWTPARFSGSLLGGKAALTLSGAQPEDEADYYCLLSYSGASWVFGGGTKLTVLGQPKAAPSVTLFPPSSEELQANKATLVCLISDFYPGAVTVAWKADSSPVKAGVETTTPSKQSNNKYAASSYLSLTPEQWKSHRSYSCQVTHEGSTVEKTVAPTECS

SEQ ID NO: 186 - protein, 121 aa, Artificial Sequence
  Description of Artificial Sequence: Synthetic polypeptide
QVQLVQSGAEVKKPGASVKVSCKVSGFSLSHFSMHWVRQVPGKGLEWLGGFDPEEGGTIPAQKFQGRLTMTEDTSTETAYMELSSLRSEDTAVYYCATGIWYSSGWPVDYWGPGTLVTVSS

SEQ ID NO: 187 - protein, 8 aa, Artificial Sequence
  Description of Artificial Sequence: Synthetic peptide
GFSLSHFS

SEQ ID NO: 188 - protein, 8 aa, Artificial Sequence
  Description of Artificial Sequence: Synthetic peptide
FDPEEGGT

SEQ ID NO: 189 - protein, 14 aa, Artificial Sequence
  Description of Artificial Sequence: Synthetic peptide
ATGIWYSSGWPVDY

SEQ ID NO: 190 - protein, 458 aa, Artificial Sequence
  Description of Artificial Sequence: Synthetic polypeptide
EVQLVQSGAEVKKPGSSVKVSCKASGGTFSSYAISWVRQAPGQGLEWMGGIIPIFGTANYAQKFQGRVTITADKSTSTAYMELSSLRSEDTAVYYCARGPWYYDSSGYSSYAYYMDVWGQGTTVTVSSASTKGPSVFPLAPSSKSTSGGTAALGCLVKDYFPEPVTVSWNSGALTSGVHTFPAVLQSSGLYSLSSVVTVPSSSLGTQTYICNVNHKPSNTKVDKKVEPKSCDKTHTCPPCPAPELLGGPSVFLFPPKPKDTLMISRTPEVTCVVVDVSHEDPEVKFNWYVDGVEVHNAKTKPREEQYNSTYRVVSVLTVLHQDWLNGKEYKCKVSNKALPAPIEKTISKAKGQPREPQVYTLPPSREEMTKNQVSLTCLVKGFYPSDIAVEWESNGQPENNYKTTPPVLDSDGSFFLYSKLTVDKSRWQQGNVFSCSVMHEALHNHYTQKSLSLSPGK

SEQ ID NO: 191 - protein, 113 aa, Artificial Sequence
  Description of Artificial Sequence: Synthetic polypeptide
DVVMTQSPLSLPVTPGGPASISCRSSQSLLDSSGYNYVDWYLQKPGQSPQLLISLGSDRASGVPDRFSGSGSGTDFTLKISRVEAEDVGIYYCMQALQTPITFGQGTRLEIKR

SEQ ID NO: 192 - protein, 11 aa, Artificial Sequence
  Description of Artificial Sequence: Synthetic peptide
QSLLDSSGYNY

SEQ ID NO: 193 - protein, 3 aa, Artificial Sequence
  Description of Artificial Sequence: Synthetic peptide
LGS

SEQ ID NO: 194 - protein, 9 aa, Artificial Sequence
  Description of Artificial Sequence: Synthetic peptide
MQALQTPIT

SEQ ID NO: 195 - protein, 219 aa, Artificial Sequence
  Description of Artificial Sequence: Synthetic polypeptide
DVVMTQSPLSLPVTPGGPASISCRSSQSLLDSSGYNYVDWYLQKPGQSPQLLISLGSDRASGVPDRFSGSGSGTDFTLKISRVEAEDVGIYYCMQALQTPITFGQGTRLEIKRTVAAPSVFIFPPSDEQLKSGTASVVCLLNNFYPREAKVQWKVDNALQSGNSQESVTEQDSKDSTYSLSSTLTLSKADYEKHKVYACEVTHQGLSSPVTKSFNRGEC

SEQ ID NO: 196 - protein, 125 aa, Artificial Sequence
  Description of Artificial Sequence: Synthetic polypeptide
EVQLVQSGAEVKKPGASVKVSCKVSGYTLTELSMHWVRQAPGKGLEWMGGFDPEDGETIYAQKFQGRVTMTEDTSTDTAYMELSSLRSEDTAVYYCATVSRVRGVINYYYYMDVWGKGTTVTVSS

SEQ ID NO: 197 - protein, 8 aa, Artificial Sequence
  Description of Artificial Sequence: Synthetic peptide
GYTLTELS

SEQ ID NO: 198 - protein, 8 aa, Artificial Sequence
  Description of Artificial Sequence: Synthetic peptide
FDPEDGET

SEQ ID NO: 199 - protein, 18 aa, Artificial Sequence
  Description of Artificial Sequence: Synthetic peptide
ATVSRVRGVINYYYYMDV

SEQ ID NO: 200 - protein, 455 aa, Artificial Sequence
  Description of Artificial Sequence: Synthetic polypeptide
EVQLVQSGAEVKKPGASVKVSCKVSGYTLTELSMHWVRQAPGKGLEWMGGFDPEDGETIYAQKFQGRVTMTEDTSTDTAYMELSSLRSEDTAVYYCATVSRVRGVINYYYYMDVWGKGTTVTVSSASTKGPSVFPLAPSSKSTSGGTAALGCLVKDYFPEPVTVSWNSGALTSGVHTFPAVLQSSGLYSLSSVVTVPSSSLGTQTYICNVNHKPSNTKVDKKVEPKSCDKTHTCPPCPAPELLGGPSVFLFPPKPKDTLMISRTPEVTCVVVDVSHEDPEVKFNWYVDGVEVHNAKTKPREEQYNSTYRVVSVLTVLHQDWLNGKEYKCKVSNKALPAPIEKTISKAKGQPREPQVYTLPPSREEMTKNQVSLTCLVKGFYPSDIAVEWESNGQPENNYKTTPPVLDSDGSFFLYSKLTVDKSRWQQGNVFSCSVMHEALHNHYTQKSLSLSPGK

SEQ ID NO: 201 - protein, 113 aa, Artificial Sequence
  Description of Artificial Sequence: Synthetic polypeptide
DVVMTQSPLSLPVTPGEPASISCRSSQSLLYRNGNNYLDWYLQKPGQSPQLLIYLGSNRASGVPDRFSGSGSGTDFTLKISRVEAEDVGVYYCMQALQTPPTFGGGTKLEIKR

SEQ ID NO: 202 - protein, 11 aa, Artificial Sequence
  Description of Artificial Sequence: Synthetic peptide
QSLLYRNGNNY

SEQ ID NO: 203 - protein, 3 aa, Artificial Sequence
  Description of Artificial Sequence: Synthetic peptide
LGS

SEQ ID NO: 204 - protein, 9 aa, Artificial Sequence
  Description of Artificial Sequence: Synthetic peptide
MQALQTPPT

SEQ ID NO: 205 - protein, 219 aa, Artificial Sequence
  Description of Artificial Sequence: Synthetic polypeptide
DVVMTQSPLSLPVTPGEPASISCRSSQSLLYRNGNNYLDWYLQKPGQSPQLLIYLGSNRASGVPDRFSGSGSGTDFTLKISRVEAEDVGVYYCMQALQTPPTFGGGTKLEIKRTVAAPSVFIFPPSDEQLKSGTASVVCLLNNFYPREAKVQWKVDNALQSGNSQESVTEQDSKDSTYSLSSTLTLSKADYEKHKVYACEVTHQGLSSPVTKSFNRGEC

SEQ ID NO: 206 - protein, 120 aa, Artificial Sequence
  Description of Artificial Sequence: Synthetic polypeptide
QVQLVQSGAEVRRPGSSVRVSCKPSGGTFGTYAFTWVRQAPGQGLEWMGGITPISATINRAQNLQDRLTITADESTTTVHMDLTSLRSEDTAVYYCARGFEYSDGLLDDWGQGTLVTVSS

SEQ ID NO: 207 - protein, 8 aa, Artificial Sequence
  Description of Artificial Sequence: Synthetic peptide
GGTFGTYA

SEQ ID NO: 208 - protein, 8 aa, Artificial Sequence
  Description of Artificial Sequence: Synthetic peptide
ITPISATI

SEQ ID NO: 209 - protein, 13 aa, Artificial Sequence
  Description of Artificial Sequence: Synthetic peptide
ARGFEYSDGLLDD

SEQ ID NO: 210 - protein, 450 aa, Artificial Sequence
  Description of Artificial Sequence: Synthetic polypeptide
QVQLVQSGAEVRRPGSSVRVSCKPSGGTFGTYAFTWVRQAPGQGLEWMGGITPISATINRAQNLQDRLTITADESTTTVHMDLTSLRSEDTAVYYCARGFEYSDGLLDDWGQGTLVTVSSASTKGPSVFPLAPSSKSTSGGTAALGCLVKDYFPEPVTVSWNSGALTSGVHTFPAVLQSSGLYSLSSVVTVPSSSLGTQTYICNVNHKPSNTKVDKKVEPKSCDKTHTCPPCPAPELLGGPSVFLFPPKPKDTLMISRTPEVTCVVVDVSHEDPEVKFNWYVDGVEVHNAKTKPREEQYNSTYRVVSVLTVLHQDWLNGKEYKCKVSNKALPAPIEKTISKAKGQPREPQVYTLPPSREEMTKNQVSLTCLVKGFYPSDIAVEWESNGQPENNYKTTPPVLDSDGSFFLYSKLTVDKSRWQQGNVFSCSVMHEALHNHYTQKSLSLSPGK

SEQ ID NO: 211 - protein, 114 aa, Artificial Sequence
  Description of Artificial Sequence: Synthetic polypeptide
DIVMTQTPLSLPVIPGEPASISCRSSQSLFYSDDGNTYLDWYLQKPGQSPQLLIYRLSHRASGVPDRFSGSGSGTDFTLKISRVEAEDVGVYYCMQHMEFPLTFGGGTKVEIKR

SEQ ID NO: 212 - protein, 12 aa, Artificial Sequence
  Description of Artificial Sequence: Synthetic peptide
QSLFYSDDGNTY

SEQ ID NO: 213 - protein, 3 aa, Artificial Sequence
  Description of Artificial Sequence: Synthetic peptide
RLS

SEQ ID NO: 214 - protein, 9 aa, Artificial Sequence
  Description of Artificial Sequence: Synthetic peptide
MQHMEFPLT

SEQ ID NO: 215 - protein, 220 aa, Artificial Sequence
  Description of Artificial Sequence: Synthetic polypeptide
DIVMTQTPLSLPVIPGEPASISCRSSQSLFYSDDGNTYLDWYLQKPGQSPQLLIYRLSHRASGVPDRFSGSGSGTDFTLKISRVEAEDVGVYYCMQHMEFPLTFGGGTKVEIKRTVAAPSVFIFPPSDEQLKSGTASVVCLLNNFYPREAKVQWKVDNALQSGNSQESVTEQDSKDSTYSLSSTLTLSKADYEKHKVYACEVTHQGLSSPVTKSFNRGEC

SEQ ID NO: 216 - protein, 117 aa, Artificial Sequence
  Description of Artificial Sequence: Synthetic polypeptide
QVQLQESGPGLVKPSGTLSLTCVVSSGSISSTNWWTWVRQPPGKGLEWIGEIYHSGSTSYNSSLKSRVTISEDKSKNQISLRLSSVTAADTAVYYCARVGPAAIYYWGQGTLVTVSS

SEQ ID NO: 217 - protein, 9 aa, Artificial Sequence
  Description of Artificial Sequence: Synthetic peptide
SGSISSTNW

SEQ ID NO: 218 - protein, 7 aa, Artificial Sequence
  Description of Artificial Sequence: Synthetic peptide
IYHSGST

SEQ ID NO: 219 - protein, 10 aa, Artificial Sequence
  Description of Artificial Sequence: Synthetic peptide
ARVGPAAIYY

SEQ ID NO: 220 - protein, 447 aa, Artificial Sequence
  Description of Artificial Sequence: Synthetic polypeptide
QVQLQESGPGLVKPSGTLSLTCVVSSGSISSTNWWTWVRQPPGKGLEWIGEIYHSGSTSYNSSLKSRVTISEDKSKNQISLRLSSVTAADTAVYYCARVGPAAIYYWGQGTLVTVSSASTKGPSVFPLAPSSKSTSGGTAALGCLVKDYFPEPVTVSWNSGALTSGVHTFPAVLQSSGLYSLSSVVTVPSSSLGTQTYICNVNHKPSNTKVDKKVEPKSCDKTHTCPPCPAPELLGGPSVFLFPPKPKDTLMISRTPEVTCVVVDVSHEDPEVKFNWYVDGVEVHNAKTKPREEQYNSTYRVVSVLTVLHQDWLNGKEYKCKVSNKALPAPIEKTISKAKGQPREPQVYTLPPSREEMTKNQVSLTCLVKGFYPSDIAVEWESNGQPENNYKTTPPVLDSDGSFFLYSKLTVDKSRWQQGNVFSCSVMHEALHNHYTQKSLSLSPGK

SEQ ID NO: 221 - protein, 111 aa, Artificial Sequence
  Description of Artificial Sequence: Synthetic polypeptide
QAGLTQPPSVSKGLRQTATLTCTGNSNNVGYEGAAWLQQHQGHAPKLLLYRNNNRPSGISKRFSASRSGNTASLTITGLQPEDEADYYCSAWDSSLNAVVFGGGTQLTVLG

SEQ ID NO: 222 - protein, 8 aa, Artificial Sequence
  Description of Artificial Sequence: Synthetic peptide
SNNVGYEG

SEQ ID NO: 223 - protein, 3 aa, Artificial Sequence
  Description of Artificial Sequence: Synthetic peptide
RNN

SEQ ID NO: 224 - protein, 11 aa, Artificial Sequence
  Description of Artificial Sequence: Synthetic peptide
SAWDSSLNAVV

SEQ ID NO: 225 - protein, 216 aa, Artificial Sequence
  Description of Artificial Sequence: Synthetic polypeptide
QAGLTQPPSVSKGLRQTATLTCTGNSNNVGYEGAAWLQQHQGHAPKLLLYRNNNRPSGISKRFSASRSGNTASLTITGLQPEDEADYYCSAWDSSLNAVVFGGGTQLTVLGQPKAAPSVTLFPPSSEELQANKATLVCLISDFYPGAVTVAWKADSSPVKAGVETTTPSKQSNNKYAASSYLSLTPEQWKSHRSYSCQVTHEGSTVEKTVAPTECS

SEQ ID NO: 226 - protein, 128 aa, Artificial Sequence
  Description of Artificial Sequence: Synthetic polypeptide
EVQLVQSGAEVKKPGASVKVSCKVSGYTLTELSMHWVRQAPGKGLEWMGGFDPEDGETIYAQKFQGRVTMTEDTSTDTAYMELSSLRSEDTAVYYCATAKPGIAVAGQNYYYYYMDVWGKGTTVTVSS

SEQ ID NO: 227 - protein, 8 aa, Artificial Sequence
  Description of Artificial Sequence: Synthetic peptide
GYTLTELS

SEQ ID NO: 228 - protein, 8 aa, Artificial Sequence
  Description of Artificial Sequence: Synthetic peptide
FDPEDGET

SEQ ID NO: 229 - protein, 21 aa, Artificial Sequence
  Description of Artificial Sequence: Synthetic peptide
ATAKPGIAVAGQNYYYYYMDV

SEQ ID NO: 230 - protein, 458 aa, Artificial Sequence
  Description of Artificial Sequence: Synthetic polypeptide
EVQLVQSGAEVKKPGASVKVSCKVSGYTLTELSMHWVRQAPGKGLEWMGGFDPEDGETIYAQKFQGRVTMTEDTSTDTAYMELSSLRSEDTAVYYCATAKPGIAVAGQNYYYYYMDVWGKGTTVTVSSASTKGPSVFPLAPSSKSTSGGTAALGCLVKDYFPEPVTVSWNSGALTSGVHTFPAVLQSSGLYSLSSVVTVPSSSLGTQTYICNVNHKPSNTKVDKKVEPKSCDKTHTCPPCPAPELLGGPSVFLFPPKPKDTLMISRTPEVTCVVVDVSHEDPEVKFNWYVDGVEVHNAKTKPREEQYNSTYRVVSVLTVLHQDWLNGKEYKCKVSNKALPAPIEKTISKAKGQPREPQVYTLPPSREEMTKNQVSLTCLVKGFYPSDIAVEWESNGQPENNYKTTPPVLDSDGSFFLYSKLTVDKSRWQQGNVFSCSVMHEALHNHYTQKSLSLSPGK

SEQ ID NO: 231 - protein, 113 aa, Artificial Sequence; identical to SEQ ID NO: 201
  Description of Artificial Sequence: Synthetic polypeptide

SEQ ID NO: 232 - protein, 11 aa, Artificial Sequence
  Description of Artificial Sequence: Synthetic peptide
QSLLYRNGNNY

SEQ ID NO: 233 - protein, 3 aa, Artificial Sequence
  Description of Artificial Sequence: Synthetic peptide
LGS

SEQ ID NO: 234 - protein, 9 aa, Artificial Sequence
  Description of Artificial Sequence: Synthetic peptide
MQALQTPPT

SEQ ID NO: 235 - protein, 219 aa, Artificial Sequence; identical to SEQ ID NO: 205
  Description of Artificial Sequence: Synthetic polypeptide

SEQ ID NO: 236 - protein, 124 aa, Artificial Sequence
  Description of Artificial Sequence: Synthetic polypeptide
EVQLVESGGGLVQPGRSLRLSCAASGFTFSSYAMHWVRQAPGKGLEWVAVISYDGSNKYYADSVKGRFTISRDNSKNTLYLQMNSLRAEDTAVYYCASSPIGYSYGYWGGMDVWGQGTTVTVSS

SEQ ID NO: 237 - protein, 8 aa, Artificial Sequence
  Description of Artificial Sequence: Synthetic peptide
GFTFSSYA

SEQ ID NO: 238 - protein, 8 aa, Artificial Sequence
  Description of Artificial Sequence: Synthetic peptide
ISYDGSNK

SEQ ID NO: 239 - protein, 17 aa, Artificial Sequence
  Description of Artificial Sequence: Synthetic peptide
ASSPIGYSYGYWGGMDV

SEQ ID NO: 240 - protein, 454 aa, Artificial Sequence
  Description of Artificial Sequence: Synthetic polypeptide
EVQLVESGGGLVQPGRSLRLSCAASGFTFSSYAMHWVRQAPGKGLEWVAVISYDGSNKYYADSVKGRFTISRDNSKNTLYLQMNSLRAEDTAVYYCASSPIGYSYGYWGGMDVWGQGTTVTVSSASTKGPSVFPLAPSSKSTSGGTAALGCLVKDYFPEPVTVSWNSGALTSGVHTFPAVLQSSGLYSLSSVVTVPSSSLGTQTYICNVNHKPSNTKVDKKVEPKSCDKTHTCPPCPAPELLGGPSVFLFPPKPKDTLMISRTPEVTCVVVDVSHEDPEVKFNWYVDGVEVHNAKTKPREEQYNSTYRVVSVLTVLHQDWLNGKEYKCKVSNKALPAPIEKTISKAKGQPREPQVYTLPPSREEMTKNQVSLTCLVKGFYPSDIAVEWESNGQPENNYKTTPPVLDSDGSFFLYSKLTVDKSRWQQGNVFSCSVMHEALHNHYTQKSLSLSPGK

SEQ ID NO: 241 - protein, 116 aa, Artificial Sequence
  Description of Artificial Sequence: Synthetic polypeptide
QAVLTQPASLSASPGASASLTCTLRSGIDVRTNKIFWYQVKPGSPPQHLLTFQSDSDKQQGSGVPSRFSGSKDASANAGILIISGLQSEDEADYYCLIWHTSGWVFGGGTQLTVLG

SEQ ID NO: 242 - protein, 9 aa, Artificial Sequence
  Description of Artificial Sequence: Synthetic peptide
SGIDVRTNK

SEQ ID NO: 243 - protein, 7 aa, Artificial Sequence
  Description of Artificial Sequence: Synthetic peptide
FQSDSDK

SEQ ID NO: 244 - protein, 9 aa, Artificial Sequence
  Description of Artificial Sequence: Synthetic peptide
LIWHTSGWV

SEQ ID NO: 245 - protein, 221 aa, Artificial Sequence
  Description of Artificial Sequence: Synthetic polypeptide
QAVLTQPASLSASPGASASLTCTLRSGIDVRTNKIFWYQVKPGSPPQHLLTFQSDSDKQQGSGVPSRFSGSKDASANAGILIISGLQSEDEADYYCLIWHTSGWVFGGGTQLTVLGQPKAAPSVTLFPPSSEELQANKATLVCLISDFYPGAVTVAWKADSSPVKAGVETTTPSKQSNNKYAASSYLSLTPEQWKSHRSYSCQVTHEGSTVEKTVAPTECS

SEQ ID NO: 246 - protein, 124 aa, Artificial Sequence
  Description of Artificial Sequence: Synthetic polypeptide
EVQLVQSGAEVKKPGASVKVSCKVSGYTLTELSMHWVRQAPGKGLEWMGGFDPEDGETIYAQKFQGRVTMTEDTSTDTAYMELSSLRSEDTAVYYCATGPAAAGVGYYYYMDVWGKGTTVTVSS

SEQ ID NO: 247 - protein, 8 aa, Artificial Sequence
  Description of Artificial Sequence: Synthetic peptide
GYTLTELS

SEQ ID NO: 248 - protein, 8 aa, Artificial Sequence
  Description of Artificial Sequence: Synthetic peptide
FDPEDGET

SEQ ID NO: 249 - protein, 17 aa, Artificial Sequence
  Description of Artificial Sequence: Synthetic peptide
ATGPAAAGVGYYYYMDV

SEQ ID NO: 250 - protein, 454 aa, Artificial Sequence
  Description of Artificial Sequence: Synthetic polypeptide
EVQLVQSGAEVKKPGASVKVSCKVSGYTLTELSMHWVRQAPGKGLEWMGGFDPEDGETIYAQKFQGRVTMTEDTSTDTAYMELSSLRSEDTAVYYCATGPAAAGVGYYYYMDVWGKGTTVTVSSASTKGPSVFPLAPSSKSTSGGTAALGCLVKDYFPEPVTVSWNSGALTSGVHTFPAVLQSSGLYSLSSVVTVPSSSLGTQTYICNVNHKPSNTKVDKKVEPKSCDKTHTCPPCPAPELLGGPSVFLFPPKPKDTLMISRTPEVTCVVVDVSHEDPEVKFNWYVDGVEVHNAKTKPREEQYNSTYRVVSVLTVLHQDWLNGKEYKCKVSNKALPAPIEKTISKAKGQPREPQVYTLPPSREEMTKNQVSLTCLVKGFYPSDIAVEWESNGQPENNYKTTPPVLDSDGSFFLYSKLTVDKSRWQQGNVFSCSVMHEALHNHYTQKSLSLSPGK

SEQ ID NO: 251 - protein, 113 aa, Artificial Sequence
  Description of Artificial Sequence: Synthetic polypeptide
DVVMTQSPLSLPVTPGEPASISCRSSQSLLYRNGYNYLDWYLQKPGQSPQLLIYLGSNRASGVPDRFSGSGSGTDFTLKISRVEAEDVGVYYCMQALQTPPTFGQGTKVEIKR

SEQ ID NO: 252 - protein, 11 aa, Artificial Sequence
  Description of Artificial Sequence: Synthetic peptide
QSLLYRNGYNY

SEQ ID NO: 253 - protein, 3 aa, Artificial Sequence
  Description of Artificial Sequence: Synthetic peptide
LGS

SEQ ID NO: 254 - protein, 9 aa, Artificial Sequence
  Description of Artificial Sequence: Synthetic peptide
MQALQTPPT

SEQ ID NO: 255 - protein, 219 aa, Artificial Sequence
  Description of Artificial Sequence: Synthetic polypeptide
DVVMTQSPLSLPVTPGEPASISCRSSQSLLYRNGYNYLDWYLQKPGQSPQLLIYLGSNRASGVPDRFSGSGSGTDFTLKISRVEAEDVGVYYCMQALQTPPTFGQGTKVEIKRTVAAPSVFIFPPSDEQLKSGTASVVCLLNNFYPREAKVQWKVDNALQSGNSQESVTEQDSKDSTYSLSSTLTLSKADYEKHKVYACEVTHQGLSSPVTKSFNRGEC

SEQ ID NO: 256 - protein, 127 aa, Artificial Sequence
  Description of Artificial Sequence: Synthetic polypeptide
EVQLVETGGGLIQPGRSLRLSCAASGFTFSSYAMHWVRQAPGKGLEWVAVISYDGSNKYYADSVKGRFTISRDNSKNTLYLQMNSLRAEDTAVYYCARDVMVYCSSTSCYFYGMDVWGQGTTVTVSS

SEQ ID NO: 257 - protein, 8 aa, Artificial Sequence
  Description of Artificial Sequence: Synthetic peptide
GFTFSSYA

SEQ ID NO: 258 - protein, 8 aa, Artificial Sequence
  Description of Artificial Sequence: Synthetic peptide
ISYDGSNK

SEQ ID NO: 259 - protein, 20 aa, Artificial Sequence
  Description of Artificial Sequence: Synthetic peptide
ARDVMVYCSSTSCYFYGMDV

SEQ ID NO: 260 - protein, 457 aa, Artificial Sequence
  Description of Artificial Sequence: Synthetic polypeptide
EVQLVETGGGLIQPGRSLRLSCAASGFTFSSYAMHWVRQAPGKGLEWVAVISYDGSNKYYADSVKGRFTISRDNSKNTLYLQMNSLRAEDTAVYYCARDVMVYCSSTSCYFYGMDVWGQGTTVTVSSASTKGPSVFPLAPSSKSTSGGTAALGCLVKDYFPEPVTVSWNSGALTSGVHTFPAVLQSSGLYSLSSVVTVPSSSLGTQTYICNVNHKPSNTKVDKKVEPKSCDKTHTCPPCPAPELLGGPSVFLFPPKPKDTLMISRTPEVTCVVVDVSHEDPEVKFNWYVDGVEVHNAKTKPREEQYNSTYRVVSVLTVLHQDWLNGKEYKCKVSNKALPAPIEKTISKAKGQPREPQVYTLPPSREEMTKNQVSLTCLVKGFYPSDIAVEWESNGQPENNYKTTPPVLDSDGSFFLYSKLTVDKSRWQQGNVFSCSVMHEALHNHYTQKSLSLSPGK

SEQ ID NO: 261 - protein, 108 aa, Artificial Sequence
  Description of Artificial Sequence: Synthetic polypeptide
DIQMTQSPSSLSASVGDRVTVTCQASQDIRDYLNWYQKKPGKAPKLLIYDASNLEAGVPSRFSGSGSGTDFTFTISGLQPEDVATYYCQQFENLPITFGQGTRLEIKR

SEQ ID NO: 262 - protein, 6 aa, Artificial Sequence
  Description of Artificial Sequence: Synthetic peptide
QDIRDY

SEQ ID NO: 263 - protein, 3 aa, Artificial Sequence
  Description of Artificial Sequence: Synthetic peptide
DAS

SEQ ID NO: 264 - protein, 9 aa, Artificial Sequence
  Description of Artificial Sequence: Synthetic peptide
QQFENLPIT

SEQ ID NO: 265 - protein, 214 aa, Artificial Sequence
  Description of Artificial Sequence: Synthetic polypeptide
DIQMTQSPSSLSASVGDRVTVTCQASQDIRDYLNWYQKKPGKAPKLLIYDASNLEAGVPSRFSGSGSGTDFTFTISGLQPEDVATYYCQQFENLPITFGQGTRLEIKRTVAAPSVFIFPPSDEQLKSGTASVVCLLNNFYPREAKVQWKVDNALQSGNSQESVTEQDSKDSTYSLSSTLTLSKADYEKHKVYACEVTHQGLSSPVTKSFNRGEC

SEQ ID NO: 266 - protein, 125 aa, Artificial Sequence
  Description of Artificial Sequence: Synthetic polypeptide
QVQLVQSGAEVKKPGASVKVSCKVSGYTLTELSMHWVRQAPGKGLEWMGGFDPEDGETIYAQKFQGRVTMTEDTSTDTAYMELSSLRSEDTAVYYCATGGYSSGFNYYYYYMDVWGKGTTVTVSS

SEQ ID NO: 267 - protein, 8 aa, Artificial Sequence
  Description of Artificial Sequence: Synthetic peptide
GYTLTELS

SEQ ID NO: 268 - protein, 8 aa, Artificial Sequence
  Description of Artificial Sequence: Synthetic peptide
FDPEDGET

SEQ ID NO: 269 - protein, 18 aa, Artificial Sequence
  Description of Artificial Sequence: Synthetic peptide
ATGGYSSGFNYYYYYMDV

SEQ ID NO: 270 - protein, 455 aa, Artificial Sequence
  Description of Artificial Sequence: Synthetic polypeptide
QVQLVQSGAEVKKPGASVKVSCKVSGYTLTELSMHWVRQAPGKGLEWMGGFDPEDGETIYAQKFQGRVTMTEDTSTDTAYMELSSLRSEDTAVYYCATGGYSSGFNYYYYYMDVWGKGTTVTVSSASTKGPSVFPLAPSSKSTSGGTAALGCLVKDYFPEPVTVSWNSGALTSGVHTFPAVLQSSGLYSLSSVVTVPSSSLGTQTYICNVNHKPSNTKVDKKVEPKSCDKTHTCPPCPAPELLGGPSVFLFPPKPKDTLMISRTPEVTCVVVDVSHEDPEVKFNWYVDGVEVHNAKTKPREEQYNSTYRVVSVLTVLHQDWLNGKEYKCKVSNKALPAPIEKTISKAKGQPREPQVYTLPPSREEMTKNQVSLTCLVKGFYPSDIAVEWESNGQPENNYKTTPPVLDSDGSFFLYSKLTVDKSRWQQGNVFSCSVMHEALHNHYTQKSLSLSPGK

SEQ ID NO: 271 - protein, 113 aa, Artificial Sequence; identical to SEQ ID NO: 201
  Description of Artificial Sequence: Synthetic polypeptide

SEQ ID NO: 272 - protein, 11 aa, Artificial Sequence
  Description of Artificial Sequence: Synthetic peptide
QSLLYRNGNNY

SEQ ID NO: 273 - protein, 3 aa, Artificial Sequence
  Description of Artificial Sequence: Synthetic peptide
LGS

SEQ ID NO: 274 - protein, 9 aa, Artificial Sequence
  Description of Artificial Sequence: Synthetic peptide
MQALQTPPT

SEQ ID NO: 275 - protein, 219 aa, Artificial Sequence; identical to SEQ ID NO: 205
  Description of Artificial Sequence: Synthetic polypeptide

SEQ ID NO: 276 - protein, 121 aa, Artificial Sequence
  Description of Artificial Sequence: Synthetic polypeptide
EVQLVQSGAEVKKPGASVKVSCKVSGYTLTELSMHWVRQAPGKGLEWMGGFDPEDGETIYAQKFQGRVTMTEDTSTDTAYMELSSLRSEDTAVYYCATGVTTYYYYGMDVWGQGTTVTVSS

SEQ ID NO: 277 - protein, 8 aa, Artificial Sequence
  Description of Artificial Sequence: Synthetic peptide
GYTLTELS

SEQ ID NO: 278 - protein, 8 aa, Artificial Sequence
  Description of Artificial Sequence: Synthetic peptide
FDPEDGET

SEQ ID NO: 279 - protein, 14 aa, Artificial Sequence
  Description of Artificial Sequence: Synthetic peptide
ATGVTTYYYYGMDV

SEQ ID NO: 280 - protein, 451 aa, Artificial Sequence
  Description of Artificial Sequence: Synthetic polypeptide
EVQLVQSGAEVKKPGASVKVSCKVSGYTLTELSMHWVRQAPGKGLEWMGGFDPEDGETIYAQKFQGRVTMTEDTSTDTAYMELSSLRSEDTAVYYCATGVTTYYYYGMDVWGQGTTVTVSSASTKGPSVFPLAPSSKSTSGGTAALGCLVKDYFPEPVTVSWNSGALTSGVHTFPAVLQSSGLYSLSSVVTVPSSSLGTQTYICNVNHKPSNTKVDKKVEPKSCDKTHTCPPCPAPELLGGPSVFLFPPKPKDTLMISRTPEVTCVVVDVSHEDPEVKFNWYVDGVEVHNAKTKPREEQYNSTYRVVSVLTVLHQDWLNGKEYKCKVSNKALPAPIEKTISKAKGQPREPQVYTLPPSREEMTKNQVSLTCLVKGFYPSDIAVEWESNGQPENNYKTTPPVLDSDGSFFLYSKLTVDKSRWQQGNVFSCSVMHEALHNHYTQKSLSLSPGK

SEQ ID NO: 281 - protein, 113 aa, Artificial Sequence
  Description of Artificial Sequence: Synthetic polypeptide
DVVMTQSPLSLPVTPGEPASISCRSSQSLLYSNGNNFLDWYLQKPGQSPRLLISLGSNRASGVPDRFSGSGSGTDFTLKISRVEAEDVGIYYCMQALQTPPTFGQGTKVEIKR

SEQ ID NO: 282 - protein, 11 aa, Artificial Sequence
  Description of Artificial Sequence: Synthetic peptide
QSLLYSNGNNF

SEQ ID NO: 283 - protein, 3 aa, Artificial Sequence
  Description of Artificial Sequence: Synthetic peptide
LGS

SEQ ID NO: 284 - protein, 9 aa, Artificial Sequence
  Description of Artificial Sequence: Synthetic peptide
MQALQTPPT

SEQ ID NO: 285 - protein, 219 aa, Artificial Sequence
  Description of Artificial Sequence: Synthetic polypeptide
DVVMTQSPLSLPVTPGEPASISCRSSQSLLYSNGNNFLDWYLQKPGQSPRLLISLGSNRASGVPDRFSGSGSGTDFTLKISRVEAEDVGIYYCMQALQTPPTFGQGTKVEIKRTVAAPSVFIFPPSDEQLKSGTASVVCLLNNFYPREAKVQWKVDNALQSGNSQESVTEQDSKDSTYSLSSTLTLSKADYEKHKVYACEVTHQGLSSPVTKSFNRGEC

SEQ ID NO: 286 - protein, 121 aa, Artificial Sequence
  Description of Artificial Sequence: Synthetic polypeptide
QITLKESGGGVVQPGGSLRLSCAASGFTFSSYGMHWVRQAPGKGLEWVAFIRYDGSNKYYADSVKGRFTISRDNSKNTLYLQMNSLRAEDTAVYYCARDLFDFWWDGMDVWGQGTTVTVSS

SEQ ID NO: 287 - protein, 8 aa, Artificial Sequence
  Description of Artificial Sequence: Synthetic peptide
GFTFSSYG

SEQ ID NO: 288 - protein, 8 aa, Artificial Sequence
  Description of Artificial Sequence: Synthetic peptide
IRYDGSNK

SEQ ID NO: 289 - protein, 14 aa, Artificial Sequence
  Description of Artificial Sequence: Synthetic peptide
ARDLFDFWWDGMDV

SEQ ID NO: 290 - protein, 451 aa, Artificial Sequence
  Description of Artificial Sequence: Synthetic polypeptide
QITLKESGGGVVQPGGSLRLSCAASGFTFSSYGMHWVRQAPGKGLEWVAFIRYDGSNKYYADSVKGRFTISRDNSKNTLYLQMNSLRAEDTAVYYCARDLFDFWWDGMDVWGQGTTVTVSSASTKGPSVFPLAPSSKSTSGGTAALGCLVKDYFPEPVTVSWNSGALTSGVHTFPAVLQSSGLYSLSSVVTVPSSSLGTQTYICNVNHKPSNTKVDKKVEPKSCDKTHTCPPCPAPELLGGPSVFLFPPKPKDTLMISRTPEVTCVVVDVSHEDPEVKFNWYVDGVEVHNAKTKPREEQYNSTYRVVSVLTVLHQDWLNGKEYKCKVSNKALPAPIEKTISKAKGQPREPQVYTLPPSREEMTKNQVSLTCLVKGFYPSDIAVEWESNGQPENNYKTTPPVLDSDGSFFLYSKLTVDKSRWQQGNVFSCSVMHEALHNHYTQKSLSLSPGK

SEQ ID NO: 291 - protein, 110 aa, Artificial Sequence
  Description of Artificial Sequence: Synthetic polypeptide
EIVLTQSPGTLSLSPGEKATLSCRVSQSVSSMYLAWYQQKPGQAPRLLIYGASYRATGIPDRFSGSGSGTDFNLTISRLEPEDFAVYYCQQYVSSPMYTFGLGTKLEIKR

SEQ ID NO: 292 - protein, 7 aa, Artificial Sequence
  Description of Artificial Sequence: Synthetic peptide
QSVSSMY

SEQ ID NO: 293 - protein, 3 aa, Artificial Sequence
  Description of Artificial Sequence: Synthetic peptide
GAS

SEQ ID NO: 294 - protein, 10 aa, Artificial Sequence
  Description of Artificial Sequence: Synthetic peptide
QQYVSSPMYT

SEQ ID NO: 295 - protein, 216 aa, Artificial Sequence
  Description of Artificial Sequence: Synthetic polypeptide
EIVLTQSPGTLSLSPGEKATLSCRVSQSVSSMYLAWYQQKPGQAPRLLIYGASYRATGIPDRFSGSGSGTDFNLTISRLEPEDFAVYYCQQYVSSPMYTFGLGTKLEIKRTVAAPSVFIFPPSDEQLKSGTASVVCLLNNFYPREAKVQWKVDNALQSGNSQESVTEQDSKDSTYSLSSTLTLSKADYEKHKVYACEVTHQGLSSPVTKSFNRGEC

SEQ ID NO: 296 - protein, 122 aa, Artificial Sequence
  Description of Artificial Sequence: Synthetic polypeptide
QVQLVQSGAEVKKPGSSVKVSCKASGGTFNNYGISWVRQAPGKGLEWMGQIIPLFGTTKYAQKFQGRVTIAADEPTSTAYMELGSLRSEDTAIYYCARDRMAADGMAVFDYWGQGTLVTVSS

SEQ ID NO: 297 - protein, 8 aa, Artificial Sequence
  Description of Artificial Sequence: Synthetic peptide
GGTFNNYG

SEQ ID NO: 298 - protein, 8 aa, Artificial Sequence
  Description of Artificial Sequence: Synthetic peptide
IIPLFGTT

SEQ ID NO: 299 - protein, 15 aa, Artificial Sequence
  Description of Artificial Sequence: Synthetic peptide
ARDRMAADGMAVFDY

SEQ ID NO: 300 - protein, 452 aa, Artificial Sequence
  Description of Artificial Sequence: Synthetic polypeptide
QVQLVQSGAEVKKPGSSVKVSCKASGGTFNNYGISWVRQAPGKGLEWMGQIIPLFGTTKYAQKFQGRVTIAADEPTSTAYMELGSLRSEDTAIYYCARDRMAADGMAVFDYWGQGTLVTVSSASTKGPSVFPLAPSSKSTSGGTAALGCLVKDYFPEPVTVSWNSGALTSGVHTFPAVLQSSGLYSLSSVVTVPSSSLGTQTYICNVNHKPSNTKVDKKVEPKSCDKTHTCPPCPAPELLGGPSVFLFPPKPKDTLMISRTPEVTCVVVDVSHEDPEVKFNWYVDGVEVHNAKTKPREEQYNSTYRVVSVLTVLHQDWLNGKEYKCKVSNKALPAPIEKTISKAKGQPREPQVYTLPPSREEMTKNQVSLTCLVKGFYPSDIAVEWESNGQPENNYKTTPPVLDSDGSFFLYSKLTVDKSRWQQGNVFSCSVMHEALHNHYTQKSLSLSPGK

SEQ ID NO: 301 - protein, 111 aa, Artificial Sequence
  Description of Artificial Sequence: Synthetic polypeptide
QSVLTQPPSVSGTPGQKVIISCSGSSSNIGRHFVFWYQQLPGTAPKLLIYKNDERPSGVPDRFSGSKSGTSASLAVSGLRSEDEADYYCSSWDAALNGVVFGGGTKLTVLG

SEQ ID NO: 302 - protein, 8 aa, Artificial Sequence
  Description of Artificial Sequence: Synthetic peptide
SSNIGRHF

SEQ ID NO: 303 - protein, 3 aa, Artificial Sequence
  Description of Artificial Sequence: Synthetic peptide
KND

SEQ ID NO: 304 - protein, 11 aa, Artificial Sequence
  Description of Artificial Sequence: Synthetic peptide
SSWDAALNGVV

SEQ ID NO: 305 - protein, 216 aa, Artificial Sequence
  Description of Artificial Sequence: Synthetic polypeptide
QSVLTQPPSVSGTPGQKVIISCSGSSSNIGRHFVFWYQQLPGTAPKLLIYKNDERPSGVPDRFSGSKSGTSASLAVSGLRSEDEADYYCSSWDAALNGVVFGGGTKLTVLGQPKAAPSVTLFPPSSEELQANKATLVCLISDFYPGAVTVAWKADSSPVKAGVETTTPSKQSNNKYAASSYLSLTPEQWKSHRSYSCQVTHEGSTVEKTVAPTECS

SEQ ID NO: 306 - protein, 126 aa, Artificial Sequence
  Description of Artificial Sequence: Synthetic polypeptide
EVQLVQSGAEVKKPGASVKVSCKVSGYTLTELSMHWVRQAPGKGLEWMGGFDPEDGETIYAQKFQGRVTMTEDTSTDTAYMELSSLRSEDTAVYYCATEVPMVRGARRYYYYMDVWGKGTTVTVSS

SEQ ID NO: 307 - protein, 8 aa, Artificial Sequence
  Description of Artificial Sequence: Synthetic peptide
GYTLTELS

SEQ ID NO: 308 - protein, 8 aa, Artificial Sequence
  Description of Artificial Sequence: Synthetic peptide
FDPEDGET

SEQ ID NO: 309 - protein, 19 aa, Artificial Sequence
  Description of Artificial Sequence: Synthetic peptide
ATEVPMVRGARRYYYYMDV

SEQ ID NO: 310 - protein, 456 aa, Artificial Sequence
  Description of Artificial Sequence: Synthetic polypeptide
EVQLVQSGAEVKKPGASVKVSCKVSGYTLTELSMHWVRQAPGKGLEWMGGFDPEDGETIYAQKFQGRVTMTEDTSTDTAYMELSSLRSEDTAVYYCATEVPMVRGARRYYYYMDVWGKGTTVTVSSASTKGPSVFPLAPSSKSTSGGTAALGCLVKDYFPEPVTVSWNSGALTSGVHTFPAVLQSSGLYSLSSVVTVPSSSLGTQTYICNVNHKPSNTKVDKKVEPKSCDKTHTCPPCPAPELLGGPSVFLFPPKPKDTLMISRTPEVTCVVVDVSHEDPEVKFNWYVDGVEVHNAKTKPREEQYNSTYRVVSVLTVLHQDWLNGKEYKCKVSNKALPAPIEKTISKAKGQPREPQVYTLPPSREEMTKNQVSLTCLVKGFYPSDIAVEWESNGQPENNYKTTPPVLDSDGSFFLYSKLTVDKSRWQQGNVFSCSVMHEALHNHYTQKSLSLSPGK

SEQ ID NO: 311 - protein, 113 aa, Artificial Sequence
  Description of Artificial Sequence: Synthetic polypeptide
DVVMTQSPLFLAVTPGEPASISCRSSQTLLYINENNYLDWYVQKPGQSPQLLIYLGSTRASGVPDRFSGGGSGTDFTLTISRVEAEDVGLYYCMQGLQTPPTFGQGTRLEIKR

SEQ ID NO: 312 - protein, 11 aa, Artificial Sequence
  Description of Artificial Sequence: Synthetic peptide
QTLLYINENNY

SEQ ID NO: 313 - protein, 3 aa, Artificial Sequence
  Description of Artificial Sequence: Synthetic peptide
LGS

SEQ ID NO: 314 - protein, 9 aa, Artificial Sequence
  Description of Artificial Sequence: Synthetic peptide
MQGLQTPPT

SEQ ID NO: 315 - protein, 219 aa, Artificial Sequence
  Description of Artificial Sequence: Synthetic polypeptide
DVVMTQSPLFLAVTPGEPASISCRSSQTLLYINENNYLDWYVQKPGQSPQLLIYLGSTRASGVPDRFSGGGSGTDFTLTISRVEAEDVGLYYCMQGLQTPPTFGQGTRLEIKRTVAAPSVFIFPPSDEQLKSGTASVVCLLNNFYPREAKVQWKVDNALQSGNSQESVTEQDSKDSTYSLSSTLTLSKADYEKHKVYACEVTHQGLSSPVTKSFNRGEC

SEQ ID NO: 316 - protein, 123 aa, Artificial Sequence
  Description of Artificial Sequence: Synthetic polypeptide
QVQLQESGPGLVKSSETLSLTCSVSGGSISNSNYYWGWIRQPPGKGLEWIGGIYYSGSTYYNPSLESRVTISEDTSKNQISLKLSSVTAADTAVYYCARGAWELSLGDWFDPWGPGTLVTVSS

SEQ ID NO: 317 - protein, 10 aa, Artificial Sequence
  Description of Artificial Sequence: Synthetic peptide
GGSISNSNYY

SEQ ID NO: 318 - protein, 7 aa, Artificial Sequence
  Description of Artificial Sequence: Synthetic peptide
IYYSGST

SEQ ID NO: 319 - protein, 15 aa, Artificial Sequence
  Description of Artificial Sequence: Synthetic peptide
ARGAWELSLGDWFDP

SEQ ID NO: 320 - protein, 453 aa, Artificial Sequence
  Description of Artificial Sequence: Synthetic polypeptide
QVQLQESGPGLVKSSETLSLTCSVSGGSISNSNYYWGWIRQPPGKGLEWIGGIYYSGSTYYNPSLESRVTISEDTSKNQISLKLSSVTAADTAVYYCARGAWELSLGDWFDPWGPGTLVTVSSASTKGPSVFPLAPSSKSTSGGTAALGCLVKDYFPEPVTVSWNSGALTSGVHTFPAVLQSSGLYSLSSVVTVPSSSLGTQTYICNVNHKPSNTKVDKKVEPKSCDKTHTCPPCPAPELLGGPSVFLFPPKPKDTLMISRTPEVTCVVVDVSHEDPEVKFNWYVDGVEVHNAKTKPREEQYNSTYRVVSVLTVLHQDWLNGKEYKCKVSNKALPAPIEKTISKAKGQPREPQVYTLPPSREEMTKNQVSLTCLVKGFYPSDIAVEWESNGQPENNYKTTPPVLDSDGSFFLYSKLTVDKSRWQQGNVFSCSVMHEALHNHYTQKSLSLSPGK

SEQ ID NO: 321 - protein, 113 aa, Artificial Sequence
  Description of Artificial Sequence: Synthetic polypeptide
QSVLTQPPSVSGAPGQRVTISCTGSSSNIGAGYDIQWYQQLPGTAPKLLIYGNNNRPSGVPDRFSGSRSGTSASLAITGLQAEDEADYYCQSYDSSLSVYVVFGGGTQLTVLG

SEQ ID NO: 322 - protein, 9 aa, Artificial Sequence
  Description of Artificial Sequence: Synthetic peptide
SSNIGAGYD

SEQ ID NO: 323 - protein, 3 aa, Artificial Sequence
  Description of Artificial Sequence: Synthetic peptide
GNN

SEQ ID NO: 324 - protein, 12 aa, Artificial Sequence
  Description of Artificial Sequence: Synthetic peptide
QSYDSSLSVYVV

SEQ ID NO: 325 - protein, 218 aa, Artificial Sequence
  Description of Artificial Sequence: Synthetic polypeptide
QSVLTQPPSVSGAPGQRVTISCTGSSSNIGAGYDIQWYQQLPGTAPKLLIYGNNNRPSGVPDRFSGSRSGTSASLAITGLQAEDEADYYCQSYDSSLSVYVVFGGGTQLTVLGQPKAAPSVTLFPPSSEELQANKATLVCLISDFYPGAVTVAWKADSSPVKAGVETTTPSKQSNNKYAASSYLSLTPEQWKSHRSYSCQVTHEGSTVEKTVAPTECS

SEQ ID NO: 326 - protein, 122 aa, Artificial Sequence
  Description of Artificial Sequence: Synthetic polypeptide
EVQLVESGGGVVKPGGSLRLSCAASGFTFGTSSMNWVRQAPGKGLEWVAVISFDGTEIHYADSVKGRFTISRDNSKSTVFLQMNSLRPDDTALYYCAKGSGNIYFYSGMDVWGQGTTVTVSS

SEQ ID NO: 327 - protein, 8 aa, Artificial Sequence
  Description of Artificial Sequence: Synthetic peptide
GFTFGTSS

SEQ ID NO: 328 - protein, 8 aa, Artificial Sequence
  Description of Artificial Sequence: Synthetic peptide
ISFDGTEI

SEQ ID NO: 329 - protein, 15 aa, Artificial Sequence
  Description of Artificial Sequence: Synthetic peptide
AKGSGNIYFYSGMDV

SEQ ID NO: 330 - protein, 452 aa, Artificial Sequence
  Description of Artificial Sequence: Synthetic polypeptide
EVQLVESGGGVVKPGGSLRLSCAASGFTFGTSSMNWVRQAPGKGLEWVAVISFDGTEIHYADSVKGRFTISRDNSKSTVFLQMNSLRPDDTALYYCAKGSGNIYFYSGMDVWGQGTTVTVSSASTKGPSVFPLAPSSKSTSGGTAALGCLVKDYFPEPVTVSWNSGALTSGVHTFPAVLQSSGLYSLSSVVTVPSSSLGTQTYICNVNHKPSNTKVDKKVEPKSCDKTHTCPPCPAPELLGGPSVFLFPPKPKDTLMISRTPEVTCVVVDVSHEDPEVKFNWYVDGVEVHNAKTKPREEQYNSTYRVVSVLTVLHQDWLNGKEYKCKVSNKALPAPIEKTISKAKGQPREPQVYTLPPSREEMTKNQVSLTCLVKGFYPSDIAVEWESNGQPENNYKTTPPVLDSDGSFFLYSKLTVDKSRWQQGNVFSCSVMHEALHNHYTQKSLSLSPGK

SEQ ID NO: 331 - protein, 108 aa, Artificial Sequence
  Description of Artificial Sequence: Synthetic polypeptide
DIQMTQSPSTLSASVGDRVTITCRAGQSISGWLAWFQQKPGKAPNLLIYETSTLESGVPSRFSGSGSGTEYTLTISSLQPDDFATYYCQQYYSYPLTFGQGTKVEIKR

SEQ ID NO: 332 - protein, 6 aa, Artificial Sequence
  Description of Artificial Sequence: Synthetic peptide
QSISGW

SEQ ID NO: 333 - protein, 3 aa, Artificial Sequence
  Description of Artificial Sequence: Synthetic peptide
ETS

SEQ ID NO: 334 - protein, 9 aa, Artificial Sequence
  Description of Artificial Sequence: Synthetic peptide
QQYYSYPLT

SEQ ID NO: 335 - protein, 214 aa, Artificial Sequence
  Description of Artificial Sequence: Synthetic polypeptide
DIQMTQSPSTLSASVGDRVTITCRAGQSISGWLAWFQQKPGKAPNLLIYETSTLESGVPSRFSGSGSGTEYTLTISSLQPDDFATYYCQQYYSYPLTFGQGTKVEIKRTVAAPSVFIFPPSDEQLKSGTASVVCLLNNFYPREAKVQWKVDNALQSGNSQESVTEQDSKDSTYSLSSTLTLSKADYEKHKVYACEVTHQGLSSPVTKSFNRGEC

SEQ ID NO: 336 - protein, 126 aa, Artificial Sequence
  Description of Artificial Sequence: Synthetic polypeptide
EVQLVQSGAEVKKPGASVKVSCKVSGYTLTELSMHWVRQAPGKGLEWMGGFDPEDGETIYAQKFQGRVTMTEDTSTDTAYMELSSLRSEDTAVYYCATGVPAAIGVYYYYYYMDVWGKGTTVTVSS

SEQ ID NO: 337 - protein, 8 aa, Artificial Sequence
  Description of Artificial Sequence: Synthetic peptide
GYTLTELS

SEQ ID NO: 338 - protein, 8 aa, Artificial Sequence
  Description of Artificial Sequence: Synthetic peptide
FDPEDGET

SEQ ID NO: 339 - protein, 19 aa, Artificial Sequence
  Description of Artificial Sequence: Synthetic peptide
ATGVPAAIGVYYYYYYMDV

SEQ ID NO: 340 - protein, 456 aa, Artificial Sequence
  Description of Artificial Sequence: Synthetic polypeptide
EVQLVQSGAEVKKPGASVKVSCKVSGYTLTELSMHWVRQAPGKGLEWMGGFDPEDGETIYAQKFQGRVTMTEDTSTDTAYMELSSLRSEDTAVYYCATGVPAAIGVYYYYYYMDVWGKGTTVTVSSASTKGPSVFPLAPSSKSTSGGTAALGCLVKDYFPEPVTVSWNSGALTSGVHTFPAVLQSSGLYSLSSVVTVPSSSLGTQTYICNVNHKPSNTKVDKKVEPKSCDKTHTCPPCPAPELLGGPSVFLFPPKPKDTLMISRTPEVTCVVVDVSHEDPEVKFNWYVDGVEVHNAKTKPREEQYNSTYRVVSVLTVLHQDWLNGKEYKCKVSNKALPAPIEKTISKAKGQPREPQVYTLPPSREEMTKNQVSLTCLVKGFYPSDIAVEWESNGQPENNYKTTPPVLDSDGSFFLYSKLTVDKSRWQQGNVFSCSVMHEALHNHYTQKSLSLSPGK

SEQ ID NO: 341 - protein, 113 aa, Artificial Sequence
  Description of Artificial Sequence: Synthetic polypeptide
DVVMTQSPLSLPVTPGEPASISCRSSQSLLYSNGYNYLDWYLQKPGQSPQLLISLGSNRASGVPDRFSGSGSGTDFTLKISRVEAEDVGVYYCMQALQSPVTFGGGTKVEIKR

SEQ ID NO: 342 - protein, 11 aa, Artificial Sequence
  Description of Artificial Sequence: Synthetic peptide
QSLLYSNGYNY

SEQ ID NO: 343 - protein, 3 aa, Artificial Sequence
  Description of Artificial Sequence: Synthetic peptide
LGS

SEQ ID NO: 344 - protein, 9 aa, Artificial Sequence
  Description of Artificial Sequence: Synthetic peptide
MQALQSPVT

SEQ ID NO: 345 - protein, 219 aa, Artificial Sequence
  Description of Artificial Sequence: Synthetic polypeptide
DVVMTQSPLSLPVTPGEPASISCRSSQSLLYSNGYNYLDWYLQKPGQSPQLLISLGSNRASGVPDRFSGSGSGTDFTLKISRVEAEDVGVYYCMQALQSPVTFGGGTKVEIKRTVAAPSVFIFPPSDEQLKSGTASVVCLLNNFYPREAKVQWKVDNALQSGNSQESVTEQDSKDSTYSLSSTLTLSKADYEKHKVYACEVTHQGLSSPVTKSFNRGEC

SEQ ID NO: 346 - protein, 127 aa, Artificial Sequence
  Description of Artificial Sequence: Synthetic polypeptide
EVQLVQSGAEVKKPGASVKVSCKVSGYTLTELSMHWVRQAPGKGLEWMGGFDPEDGETIYAQKFQGRVTMTEDTSTDTAYMELSSLRSEDTAVYYCATDSRDGPAARGGYYYYMDVWGQGTTVTVSS

SEQ ID NO: 347 - protein, 8 aa, Artificial Sequence
  Description of Artificial Sequence: Synthetic peptide
GYTLTELS

SEQ ID NO: 348 - protein, 8 aa, Artificial Sequence
  Description of Artificial Sequence: Synthetic peptide
FDPEDGET

SEQ ID NO: 349 - protein, 20 aa, Artificial Sequence
  Description of Artificial Sequence: Synthetic peptide
ATDSRDGPAARGGYYYYMDV

SEQ ID NO: 350 - protein, 457 aa, Artificial Sequence
  Description of Artificial Sequence: Synthetic polypeptide
EVQLVQSGAEVKKPGASVKVSCKVSGYTLTELSMHWVRQAPGKGLEWMGGFDPEDGETIYAQKFQGRVTMTEDTSTDTAYMELSSLRSEDTAVYYCATDSRDGPAARGGYYYYMDVWGQGTTVTVSSASTKGPSVFPLAPSSKSTSGGTAALGCLVKDYFPEPVTVSWNSGALTSGVHTFPAVLQSSGLYSLSSVVTVPSSSLGTQTYICNVNHKPSNTKVDKKVEPKSCDKTHTCPPCPAPELLGGPSVFLFPPKPKDTLMISRTPEVTCVVVDVSHEDPEVKFNWYVDGVEVHNAKTKPREEQYNSTYRVVSVLTVLHQDWLNGKEYKCKVSNKALPAPIEKTISKAKGQPREPQVYTLPPSREEMTKNQVSLTCLVKGFYPSDIAVEWESNGQPENNYKTTPPVLDSDGSFFLYSKLTVDKSRWQQGNVFSCSVMHEALHNHYTQKSLSLSPGK

SEQ ID NO: 351 - protein, 113 aa, Artificial Sequence
  Description of Artificial Sequence: Synthetic polypeptide
DVVMTQSPLSLPVTLGQPASISCRSSQSLLYINGYNYLDWYLQKPGQSPQLLIYLGSNRASGVPDRFSGSGSGTDFTLKISRVEAEDVGVYYCMQALQTPPTFGQGTKVEIKR

SEQ ID NO: 352 - protein, 11 aa, Artificial Sequence
  Description of Artificial Sequence: Synthetic peptide
QSLLYINGYNY

SEQ ID NO: 353 - protein, 3 aa, Artificial Sequence
  Description of Artificial Sequence: Synthetic peptide
LGS

SEQ ID NO: 354 - protein, 9 aa, Artificial Sequence
  Description of Artificial Sequence: Synthetic peptide
MQALQTPPT

SEQ ID NO: 355 - protein, 219 aa, Artificial Sequence
  Description of Artificial Sequence: Synthetic polypeptide
DVVMTQSPLSLPVTLGQPASISCRSSQSLLYINGYNYLDWYLQKPGQSPQLLIYLGSNRASGVPDRFSGSGSGTDFTLKISRVEAEDVGVYYCMQALQTPPTFGQGTKVEIKRTVAAPSVFIFPPSDEQLKSGTASVVCLLNNFYPREAKVQWKVDNALQSGNSQESVTEQDSKDSTYSLSSTLTLSKADYEKHKVYACEVTHQGLSSPVTKSFNRGEC

SEQ ID NO: 356 - protein, 127 aa, Artificial Sequence
  Description of Artificial Sequence: Synthetic polypeptide
EVQLVQSGAEVKKPGSSVKVSCKASGGTFSSYAISWVRQAPGQGLEWMGGIIPIFGTANYAQKFQGRVTITADESTSTAYMELSSLRSEDTAVYYCARDAYYYDSSGYYNPDAFDIWGQGTMVTVSS

SEQ ID NO: 357 - protein, 8 aa, Artificial Sequence
  Description of Artificial Sequence: Synthetic peptide
GGTFSSYA

SEQ ID NO: 358 - protein, 8 aa, Artificial Sequence
  Description of Artificial Sequence: Synthetic peptide
IIPIFGTA

SEQ ID NO: 359 - protein, 20 aa, Artificial Sequence
  Description of Artificial Sequence: Synthetic peptide
ARDAYYYDSSGYYNPDAFDI

SEQ ID NO: 360 - protein, 457 aa, Artificial Sequence
  Description of Artificial Sequence: Synthetic polypeptide
EVQLVQSGAEVKKPGSSVKVSCKASGGTFSSYAISWVRQAPGQGLEWMGGIIPIFGTANYAQKFQGRVTITADESTSTAYMELSSLRSEDTAVYYCARDAYYYDSSGYYNPDAFDIWGQGTMVTVSSASTKGPSVFPLAPSSKSTSGGTAALGCLVKDYFPEPVTVSWNSGALTSGVHTFPAVLQSSGLYSLSSVVTVPSSSLGTQTYICNVNHKPSNTKVDKKVEPKSCDKTHTCPPCPAPELLGGPSVFLFPPKPKDTLMISRTPEVTCVVVDVSHEDPEVKFNWYVDGVEVHNAKTKPREEQYNSTYRVVSVLTVLHQDWLNGKEYKCKVSNKALPAPIEKTISKAKGQPREPQVYTLPPSREEMTKNQVSLTCLVKGFYPSDIAVEWESNGQPENNYKTTPPVLDSDGSFFLYSKLTVDKSRWQQGNVFSCSVMHEALHNHYTQKSLSLSPGK

SEQ ID NO: 361 - protein, 113 aa, Artificial Sequence
  Description of Artificial Sequence: Synthetic polypeptide
DVVMTQSPLSLPVTPGEPASISCRSSQSLLHSNGYNYLDWYLQKPGQSPQLLIYLGSSRASGVPDRFSGSVSGTDFTLKISRVEAEDVGVYYCMQGLQTPRTFGRGTKLEIKR

SEQ ID NO: 362 - protein, 11 aa, Artificial Sequence
  Description of Artificial Sequence: Synthetic peptide
QSLLHSNGYNY

SEQ ID NO: 363 - protein, 3 aa, Artificial Sequence
  Description of Artificial Sequence: Synthetic peptide
LGS

SEQ ID NO: 364 - protein, 9 aa, Artificial Sequence
  Description of Artificial Sequence: Synthetic peptide
MQGLQTPRT

SEQ ID NO: 365 - protein, 219 aa, Artificial Sequence
  Description of Artificial Sequence: Synthetic polypeptide
DVVMTQSPLSLPVTPGEPASISCRSSQSLLHSNGYNYLDWYLQKPGQSPQLLIYLGSSRASGVPDRFSGSVSGTDFTLKISRVEAEDVGVYYCMQGLQTPRTFGRGTKLEIKRTVAAPSVFIFPPSDEQLKSGTASVVCLLNNFYPREAKVQWKVDNALQSGNSQESVTEQDSKDSTYSLSSTLTLSKADYEKHKVYACEVTHQGLSSPVTKSFNRGEC

SEQ ID NO: 366 - protein, 129 aa, Artificial Sequence
  Description of Artificial Sequence: Synthetic polypeptide
QVQLVQSGAEVKKPGSSVKVSCKASGGTFSSSAISWVRQAPGQGFEWMGGIIPIYGITDYAQKFQGRVTITTDESTSTAYMELSSLTSEDTAVYYCARDDTARRVRGVPYYYYYAMDVWGQGTTVTVSS

SEQ ID NO: 367 - protein, 8 aa, Artificial Sequence
  Description of Artificial Sequence: Synthetic peptide
GGTFSSSA

SEQ ID NO: 368 - protein, 8 aa, Artificial Sequence
  Description of Artificial Sequence: Synthetic peptide
IIPIYGIT

SEQ ID NO: 369 - protein, 22 aa, Artificial Sequence
  Description of Artificial Sequence: Synthetic peptide
ARDDTARRVRGVPYYYYYAMDV

SEQ ID NO: 370 - protein, 459 aa, Artificial Sequence
  Description of Artificial Sequence: Synthetic polypeptide
QVQLVQSGAEVKKPGSSVKVSCKASGGTFSSSAISWVRQAPGQGFEWMGGIIPIYGITDYAQKFQGRVTITTDESTSTAYMELSSLTSEDTAVYYCARDDTARRVRGVPYYYYYAMDVWGQGTTVTVSSASTKGPSVFPLAPSSKSTSGGTAALGCLVKDYFPEPVTVSWNSGALTSGVHTFPAVLQSSGLYSLSSVVTVPSSSLGTQTYICNVNHKPSNTKVDKKVEPKSCDKTHTCPPCPAPELLGGPSVFLFPPKPKDTLMISRTPEVTCVVVDVSHEDPEVKFNWYVDGVEVHNAKTKPREEQYNSTYRVVSVLTVLHQDWLNGKEYKCKVSNKALPAPIEKTISKAKGQPREPQVYTLPPSREEMTKNQVSLTCLVKGFYPSDIAVEWESNGQPENNYKTTPPVLDSDGSFFLYSKLTVDKSRWQQGNVFSCSVMHEALHNHYTQKSLSLSPGK

SEQ ID NO: 371 - protein, 108 aa, Artificial Sequence
  Description of Artificial Sequence: Synthetic polypeptide
ETTLTQSPAFMSATPGDEVNISCKASQDIDDDVSWYQQKPGGAPIFLIQEASTLVPGIPPRFSGSGFGTDFTLTIKNMESEDAAYYFCLQHDNLPLTFGGGTKVDIKR

SEQ ID NO: 372 - protein, 6 aa, Artificial Sequence
  Description of Artificial Sequence: Synthetic peptide
QDIDDD

SEQ ID NO: 373 - protein, 3 aa, Artificial Sequence
  Description of Artificial Sequence: Synthetic peptide
EAS

SEQ ID NO: 374 - protein, 9 aa, Artificial Sequence
  Description of Artificial Sequence: Synthetic peptide
LQHDNLPLT

SEQ ID NO: 375 - protein, 214 aa, Artificial Sequence
  Description of Artificial Sequence: Synthetic polypeptide
ETTLTQSPAFMSATPGDEVNISCKASQDIDDDVSWYQQKPGGAPIFLIQEASTLVPGIPPRFSGSGFGTDFTLTIKNMESEDAAYYFCLQHDNLPLTFGGGTKVDIKRTVAAPSVFIFPPSDEQLKSGTASVVCLLNNFYPREAKVQWKVDNALQSGNSQESVTEQDSKDSTYSLSSTLTLSKADYEKHKVYACEVTHQGLSSPVTKSFNRGEC

SEQ ID NO: 376 - protein, 126 aa, Artificial Sequence
  Description of Artificial Sequence: Synthetic polypeptide
EVQLVQSGAEVKKPGASVKVSCKVSGYTLTELSMHWVRQAPGKGLEWMGGFDPEDGETIYAQKFQGRVTMTEDTSTDTAYMELSSLRSEDTAVYYCATEDPGPVAGPYYYYGMDVWGQGTTVTVSS

SEQ ID NO: 377 - protein, 8 aa, Artificial Sequence
  Description of Artificial Sequence: Synthetic peptide
GYTLTELS

SEQ ID NO: 378 - protein, 8 aa, Artificial Sequence
  Description of Artificial Sequence: Synthetic peptide
FDPEDGET

SEQ ID NO: 379 - protein, 19 aa, Artificial Sequence
  Description of Artificial Sequence: Synthetic peptide
ATEDPGPVAGPYYYYGMDV

SEQ ID NO: 380 - protein, 456 aa, Artificial Sequence
  Description of Artificial Sequence: Synthetic polypeptide
EVQLVQSGAEVKKPGASVKVSCKVSGYTLTELSMHWVRQAPGKGLEWMGGFDPEDGETIYAQKFQGRVTMTEDTSTDTAYMELSSLRSEDTAVYYCATEDPGPVAGPYYYYGMDVWGQGTTVTVSSASTKGPSVFPLAPSSKSTSGGTAALGCLVKDYFPEPVTVSWNSGALTSGVHTFPAVLQSSGLYSLSSVVTVPSSSLGTQTYICNVNHKPSNTKVDKKVEPKSCDKTHTCPPCPAPELLGGPSVFLFPPKPKDTLMISRTPEVTCVVVDVSHEDPEVKFNWYVDGVEVHNAKTKPREEQYNSTYRVVSVLTVLHQDWLNGKEYKCKVSNKALPAPIEKTISKAKGQPREPQVYTLPPSREEMTKNQVSLTCLVKGFYPSDIAVEWESNGQPENNYKTTPPVLDSDGSFFLYSKLTVDKSRWQQGNVFSCSVMHEALHNHYTQKSLSLSPGK

SEQ ID NO: 381 - protein, 113 aa, Artificial Sequence
  Description of Artificial Sequence: Synthetic polypeptide
DVVMTQSPLVLPVTPGEPASISCRSSQSLLYINGYHYLDWYVQRPGQSPQLLIFLGSTRASGVPDRFSGSGSGTDFTLEISKVEAEDVGIYFCMQALQTPPTFGGGTKVEIKR

SEQ ID NO: 382 - protein, 11 aa, Artificial Sequence
  Description of Artificial Sequence: Synthetic peptide
QSLLYINGYHY

SEQ ID NO: 383 - protein, 3 aa, Artificial Sequence
  Description of Artificial Sequence: Synthetic peptide
LGS

SEQ ID NO: 384 - protein, 9 aa, Artificial Sequence
  Description of Artificial Sequence: Synthetic peptide
MQALQTPPT

SEQ ID NO: 385 - protein, 219 aa, Artificial Sequence
  Description of Artificial Sequence: Synthetic polypeptide
DVVMTQSPLVLPVTPGEPASISCRSSQSLLYINGYHYLDWYVQRPGQSPQLLIFLGSTRASGVPDRFSGSGSGTDFTLEISKVEAEDVGIYFCMQALQTPPTFGGGTKVEIKRTVAAPSVFIFPPSDEQLKSGTASVVCLLNNFYPREAKVQWKVDNALQSGNSQESVTEQDSKDSTYSLSSTLTLSKADYEKHKVYACEVTHQGLSSPVTKSFNRGEC

SEQ ID NO: 386 - protein, 129 aa, Artificial Sequence; identical to SEQ ID NO: 366
  Description of Artificial Sequence: Synthetic polypeptide

SEQ ID NO: 387 - protein, 8 aa, Artificial Sequence
  Description of Artificial Sequence: Synthetic peptide
GGTFSSSA

SEQ ID NO: 388 - protein, 8 aa, Artificial Sequence
  Description of Artificial Sequence: Synthetic peptide
IIPIYGIT

SEQ ID NO: 389 - protein, 22 aa, Artificial Sequence
  Description of Artificial Sequence: Synthetic peptide
ARDDTARRVRGVPYYYYYAMDV

SEQ ID NO: 390 - protein, 459 aa, Artificial Sequence; identical to SEQ ID NO: 370
  Description of Artificial Sequence: Synthetic polypeptide

SEQ ID NO: 391 - protein, 114 aa, Artificial Sequence
  Description of Artificial Sequence: Synthetic polypeptide
DIVMTQTPLSLPVTPGEPASISCRPSQSLLDSDDGNTYLDWYLQKPGQSPQLLIHTLSYRASGVPDRFSGSGSGTDFTLKISRVEAEDVGVYYCMQRLQFPLTFGGGTKVEIKR

SEQ ID NO: 392 - protein, 12 aa, Artificial Sequence
  Description of Artificial Sequence: Synthetic peptide
QSLLDSDDGNTY

SEQ ID NO: 393 - protein, 3 aa, Artificial Sequence
  Description of Artificial Sequence: Synthetic peptide
TLS

SEQ ID NO: 394 - protein, 9 aa, Artificial Sequence
  Description of Artificial Sequence: Synthetic peptide
MQRLQFPLT

SEQ ID NO: 395 - protein, 220 aa, Artificial Sequence
  Description of Artificial Sequence: Synthetic polypeptide
DIVMTQTPLSLPVTPGEPASISCRPSQSLLDSDDGNTYLDWYLQKPGQSPQLLIHTLSYRASGVPDRFSGSGSGTDFTLKISRVEAEDVGVYYCMQRLQFPLTFGGGTKVEIKRTVAAPSVFIFPPSDEQLKSGTASVVCLLNNFYPREAKVQWKVDNALQSGNSQESVTEQDSKDSTYSLSSTLTLSKADYEKHKVYACEVTHQGLSSPVTKSFNRGEC

SEQ ID NO: 396 - protein, 126 aa, Artificial Sequence; identical to SEQ ID NO: 336
  Description of Artificial Sequence: Synthetic polypeptide

SEQ ID NO: 397 - protein, 8 aa, Artificial Sequence
  Description of Artificial Sequence: Synthetic peptide
GYTLTELS

SEQ ID NO: 398 - protein, 8 aa, Artificial Sequence
  Description of Artificial Sequence: Synthetic peptide
FDPEDGET

SEQ ID NO: 399 - protein, 19 aa, Artificial Sequence
  Description of Artificial Sequence: Synthetic peptide
ATGVPAAIGVYYYYYYMDV

SEQ ID NO: 400 - protein, 456 aa, Artificial Sequence; identical to SEQ ID NO: 340
  Description of Artificial Sequence: Synthetic polypeptide

SEQ ID NO: 401 - protein, 113 aa, Artificial Sequence
  Description of Artificial Sequence: Synthetic polypeptide
DVVMTQSPLSLPVTPGEPASISCRSSQSLLYRNGYNYLDWYLQKPGQSPQLLIYWGSYRASGVPDRFSGSGSGTDFTLKISRVEAEDVGVYYCMQAVQNPPTFGQGTKVDIKR

SEQ ID NO: 402 - protein, 11 aa, Artificial Sequence
  Description of Artificial Sequence: Synthetic peptide
QSLLYRNGYNY

SEQ ID NO: 403 - protein, 3 aa, Artificial Sequence
  Description of Artificial Sequence: Synthetic peptide
WGS

SEQ ID NO: 404 - protein, 9 aa, Artificial Sequence
  Description of Artificial Sequence: Synthetic peptide
MQAVQNPPT

SEQ ID NO: 405 - protein, 219 aa, Artificial Sequence
  Description of Artificial Sequence: Synthetic polypeptide
DVVMTQSPLSLPVTPGEPASISCRSSQSLLYRNGYNYLDWYLQKPGQSPQLLIYWGSYRASGVPDRFSGSGSGTDFTLKISRVEAEDVGVYYCMQAVQNPPTFGQGTKVDIKRTVAAPSVFIFPPSDEQLKSGTASVVCLLNNFYPREAKVQWKVDNALQSGNSQESVTEQDSKDSTYSLSSTLTLSKADYEKHKVYACEVTHQGLSSPVTKSFNRGEC

SEQ ID NO: 406 - protein, 129 aa, Artificial Sequence; identical to SEQ ID NO: 366
  Description of Artificial Sequence: Synthetic polypeptide

SEQ ID NO: 407 - protein, 8 aa, Artificial Sequence
  Description of Artificial Sequence: Synthetic peptide
GGTFSSSA

SEQ ID NO: 408 - protein, 8 aa, Artificial Sequence
  Description of Artificial Sequence: Synthetic peptide
IIPIYGIT

SEQ ID NO: 409 - protein, 22 aa, Artificial Sequence
  Description of Artificial Sequence: Synthetic peptide
ARDDTARRVRGVPYYYYYAMDV

SEQ ID NO: 410 - protein, 459 aa, Artificial Sequence; identical to SEQ ID NO: 370
  Description of Artificial Sequence: Synthetic polypeptide

SEQ ID NO: 411 - protein, 109 aa, Artificial Sequence
  Description of Artificial Sequence: Synthetic polypeptide
DVVMTQSPAFLSVTPGERVTLSCKASQTMNNYLAWYQQKPGQAPRLLIYDASTRATDTPPRFSGSGSGTEFTLTISSVQSEDFALYYCQQYGDWLPITFGQGTRLEIKR

SEQ ID NO: 412 - protein, 6 aa, Artificial Sequence
  Description of Artificial Sequence: Synthetic peptide
QTMNNY

SEQ ID NO: 413 - protein, 3 aa, Artificial Sequence
  Description of Artificial Sequence: Synthetic peptide
DAS

SEQ ID NO: 414 - protein, 10 aa, Artificial Sequence
  Description of Artificial Sequence: Synthetic peptide
QQYGDWLPIT

SEQ ID NO: 415 - protein, 215 aa, Artificial Sequence
  Description of Artificial Sequence: Synthetic polypeptide
DVVMTQSPAFLSVTPGERVTLSCKASQTMNNYLAWYQQKPGQAPRLLIYDASTRATDTPPRFSGSGSGTEFTLTISSVQSEDFALYYCQQYGDWLPITFGQGTRLEIKRTVAAPSVFIFPPSDEQLKSGTASVVCLLNNFYPREAKVQWKVDNALQSGNSQESVTEQDSKDSTYSLSSTLTLSKADYEKHKVYACEVTHQGLSSPVTKSFNRGEC

SEQ ID NO: 416 - protein, 124 aa, Artificial Sequence
  Description of Artificial Sequence: Synthetic polypeptide
EVQLVQSGAEVKKPGASVKVSCKVSGYTLTELSMHWVRQAPGKGLEWMGGFDPEDGETIYAQKFQGRVTMTEDTSTDTAYMELSSLRSEDTAVYYCATAFPEATISYYYYMDVWGKGTTVTVSS

SEQ ID NO: 417 - protein, 8 aa, Artificial Sequence
  Description of Artificial Sequence: Synthetic peptide
GYTLTELS

SEQ ID NO: 418 - protein, 8 aa, Artificial Sequence
  Description of Artificial Sequence: Synthetic peptide
FDPEDGET

SEQ ID NO: 419 - protein, 17 aa, Artificial Sequence
  Description of Artificial Sequence: Synthetic peptide
ATAFPEATISYYYYMDV

SEQ ID NO: 420 - protein, 454 aa, Artificial Sequence
  Description of Artificial Sequence: Synthetic polypeptide
EVQLVQSGAEVKKPGASVKVSCKVSGYTLTELSMHWVRQAPGKGLEWMGGFDPEDGETIYAQKFQGRVTMTEDTSTDTAYMELSSLRSEDTAVYYCATAFPEATISYYYYMDVWGKGTTVTVSSASTKGPSVFPLAPSSKSTSGGTAALGCLVKDYFPEPVTVSWNSGALTSGVHTFPAVLQSSGLYSLSSVVTVPSSSLGTQTYICNVNHKPSNTKVDKKVEPKSCDKTHTCPPCPAPELLGGPSVFLFPPKPKDTLMISRTPEVTCVVVDVSHEDPEVKFNWYVDGVEVHNAKTKPREEQYNSTYRVVSVLTVLHQDWLNGKEYKCKVSNKALPAPIEKTISKAKGQPREPQVYTLPPSREEMTKNQVSLTCLVKGFYPSDIAVEWESNGQPENNYKTTPPVLDSDGSFFLYSKLTVDKSRWQQGNVFSCSVMHEALHNHYTQKSLSLSPGK

SEQ ID NO: 421 - protein, 113 aa, Artificial Sequence
  Description of Artificial Sequence: Synthetic polypeptide
DVVMTQSPLSLPVTPGEPASISCRSSQSLLYRNGYNYLDWYLQKPGQSPQLLIYWGSYRASGVPDRFSGSGSGTDFTLKISRVEAEDVGVYYCMQAVQNPPTFGQGTKVEIKR

SEQ ID NO: 422 - protein, 11 aa, Artificial Sequence
  Description of Artificial Sequence: Synthetic peptide
QSLLYRNGYNY

SEQ ID NO: 423 - protein, 3 aa, Artificial Sequence
  Description of Artificial Sequence: Synthetic peptide
WGS

SEQ ID NO: 424 - protein, 9 aa, Artificial Sequence
  Description of Artificial Sequence: Synthetic peptide
MQAVQNPPT

SEQ ID NO: 425 - protein, 219 aa, Artificial Sequence
  Description of Artificial Sequence: Synthetic polypeptide
DVVMTQSPLSLPVTPGEPASISCRSSQSLLYRNGYNYLDWYLQKPGQSPQLLIYWGSYRASGVPDRFSGSGSGTDFTLKISRVEAEDVGVYYCMQAVQNPPTFGQGTKVEIKRTVAAPSVFIFPPSDEQLKSGTASVVCLLNNFYPREAKVQWKVDNALQSGNSQESVTEQDSKDSTYSLSSTLTLSKADYEKHKVYACEVTHQGLSSPVTKSFNRGEC

SEQ ID NO: 426 - protein, 129 aa, Artificial Sequence
  Description of Artificial Sequence: Synthetic polypeptide
QMQLVQSGAEVKKPGSSVKVSCKASGGTFSSSAISWVRQAPGQGFEWMGGIIPIYGITDYAQKFQGRVTITTDESTSTAYMELSSLTSEDTAVYYCARDDTARRVRGVPYYYYYAMDVWGQGTTVTVSS

SEQ ID NO: 427 - protein, 8 aa, Artificial Sequence
  Description of Artificial Sequence: Synthetic peptide
GGTFSSSA

SEQ ID NO: 428 - protein, 8 aa, Artificial Sequence
  Description of Artificial Sequence: Synthetic peptide
IIPIYGIT

SEQ ID NO: 429 - protein, 22 aa, Artificial Sequence
  Description of Artificial Sequence: Synthetic peptide
ARDDTARRVRGVPYYYYYAMDV

SEQ ID NO: 430 - protein, 459 aa, Artificial Sequence
  Description of Artificial Sequence: Synthetic polypeptide
QMQLVQSGAEVKKPGSSVKVSCKASGGTFSSSAISWVRQAPGQGFEWMGGIIPIYGITDYAQKFQGRVTITTDESTSTAYMELSSLTSEDTAVYYCARDDTARRVRGVPYYYYYAMDVWGQGTTVTVSSASTKGPSVFPLAPSSKSTSGGTAALGCLVKDYFPEPVTVSWNSGALTSGVHTFPAVLQSSGLYSLSSVVTVPSSSLGTQTYICNVNHKPSNTKVDKKVEPKSCDKTHTCPPCPAPELLGGPSVFLFPPKPKDTLMISRTPEVTCVVVDVSHEDPEVKFNWYVDGVEVHNAKTKPREEQYNSTYRVVSVLTVLHQDWLNGKEYKCKVSNKALPAPIEKTISKAKGQPREPQVYTLPPSREEMTKNQVSLTCLVKGFYPSDIAVEWESNGQPENNYKTTPPVLDSDGSFFLYSKLTVDKSRWQQGNVFSCSVMHEALHNHYTQKSLSLSPGK

SEQ ID NO: 431 - protein, 114 aa, Artificial Sequence
  Description of Artificial Sequence: Synthetic polypeptide
DIVMTQTPLSLPVTPGEPASMSCRSSRSLLDSDDGNTHLDWYLQKPGQSPQLLIQSLSYRASGVPDRFSGSGSGTDFTLEISRVEAEDVGIYYCMQRKEFPLTFGGGTKVEIKR

SEQ ID NO: 432 - protein, 12 aa, Artificial Sequence
  Description of Artificial Sequence: Synthetic peptide
RSLLDSDDGNTH

SEQ ID NO: 433 - protein, 3 aa, Artificial Sequence
  Description of Artificial Sequence: Synthetic peptide
SLS

SEQ ID NO: 434 - protein, 9 aa, Artificial Sequence
  Description of Artificial Sequence: Synthetic peptide
MQRKEFPLT

SEQ ID NO: 435 - protein, 220 aa, Artificial Sequence
  Description of Artificial Sequence: Synthetic polypeptide
DIVMTQTPLSLPVTPGEPASMSCRSSRSLLDSDDGNTHLDWYLQKPGQSPQLLIQSLSYRASGVPDRFSGSGSGTDFTLEISRVEAEDVGIYYCMQRKEFPLTFGGGTKVEIKRTVAAPSVFIFPPSDEQLKSGTASVVCLLNNFYPREAKVQWKVDNALQSGNSQESVTEQDSKDSTYSLSSTLTLSKADYEKHKVYACEVTHQGLSSPVTKSFNRGEC

SEQ ID NO: 436 - protein, 128 aa, Artificial Sequence
  Description of Artificial Sequence: Synthetic polypeptide
EVQLVQSGAEVKKPGSSVKVSCKASGGTFSSYAISWVRQAPGQGLEWMGGIIPIFGTANYAQKFQGRVTITADKSTSTAYMELSSLRSEDTAVYYCARGPWYYDSSGYSSYAYYMDVWGQGTTVTVSS

SEQ ID NO: 437 - protein, 8 aa, Artificial Sequence
  Description of Artificial Sequence: Synthetic peptide
GGTFSSYA

SEQ ID NO: 438 - protein, 8 aa, Artificial Sequence
  Description of Artificial Sequence: Synthetic peptide
IIPIFGTA

SEQ ID NO: 439 - protein, 21 aa, Artificial Sequence
  Description of Artificial Sequence: Synthetic peptide
ARGPWYYDSSGYSSYAYYMDV

SEQ ID NO: 440 - protein, 458 aa, Artificial Sequence; identical to SEQ ID NO: 190
  Description of Artificial Sequence: Synthetic polypeptide

SEQ ID NO: 441 - protein, 114 aa, Artificial Sequence
  Description of Artificial Sequence: Synthetic polypeptide
DVVMTQSPLSLPVTPGEPASISCRSSQSLLHSDGYNYLDWYLQKPGQSPQLLIYLGSNRASGVPDRFSGSGSGTDFTLKISRVEAEDVGVYYCMQALHTPGVTFGGGTKVEIKR

SEQ ID NO: 442 - protein, 11 aa, Artificial Sequence
  Description of Artificial Sequence: Synthetic peptide
QSLLHSDGYNY

SEQ ID NO: 443 - protein, 3 aa, Artificial Sequence
  Description of Artificial Sequence: Synthetic peptide
LGS

SEQ ID NO: 444 - protein, 10 aa, Artificial Sequence
  Description of Artificial Sequence: Synthetic peptide
MQALHTPGVT

SEQ ID NO: 445 - protein, 220 aa, Artificial Sequence
  Description of Artificial Sequence: Synthetic polypeptide
DVVMTQSPLSLPVTPGEPASISCRSSQSLLHSDGYNYLDWYLQKPGQSPQLLIYLGSNRASGVPDRFSGSGSGTDFTLKISRVEAEDVGVYYCMQALHTPGVTFGGGTKVEIKRTVAAPSVFIFPPSDEQLKSGTASVVCLLNNFYPREAKVQWKVDNALQSGNSQESVTEQDSKDSTYSLSSTLTLSKADYEKHKVYACEVTHQGLSSPVTKSFNRGEC

SEQ ID NO: 446 - protein, 123 aa, Artificial Sequence
  Description of Artificial Sequence: Synthetic polypeptide
QLQLQESGPGLVKPSETLSLTCTVTGGSISSSSYYWAWIRQPPGKGLEWIGGIYYSGSTYYNVSLESRVTISQDTSKNQFSLKLTSVTAADTAVYYCARGAWELRLGDWFDPWGQGTLVTVSS

SEQ ID NO: 447 - protein, 10 aa, Artificial Sequence
  Description of Artificial Sequence: Synthetic peptide
GGSISSSSYY

SEQ ID NO: 448 - protein, 7 aa, Artificial Sequence
  Description of Artificial Sequence: Synthetic peptide
IYYSGST

SEQ ID NO: 449 - protein, 15 aa, Artificial Sequence
  Description of Artificial Sequence: Synthetic peptide
ARGAWELRLGDWFDP

SEQ ID NO: 450 - protein, 453 aa, Artificial Sequence
  Description of Artificial Sequence: Synthetic polypeptide
QLQLQESGPGLVKPSETLSLTCTVTGGSISSSSYYWAWIRQPPGKGLEWIGGIYYSGSTYYNVSLESRVTISQDTSKNQFSLKLTSVTAADTAVYYCARGAWELRLGDWFDPWGQGTLVTVSSASTKGPSVFPLAPSSKSTSGGTAALGCLVKDYFPEPVTVSWNSGALTSGVHTFPAVLQSSGLYSLSSVVTVPSSSLGTQTYICNVNHKPSNTKVDKKVEPKSCDKTHTCPPCPAPELLGGPSVFLFPPKPKDTLMISRTPEVTCVVVDVSHEDPEVKFNWYVDGVEVHNAKTKPREEQYNSTYRVVSVLTVLHQDWLNGKEYKCKVSNKALPAPIEKTISKAKGQPREPQVYTLPPSREEMTKNQVSLTCLVKGFYPSDIAVEWESNGQPENNYKTTPPVLDSDGSFFLYSKLTVDKSRWQQGNVFSCSVMHEALHNHYTQKSLSLSPGK

SEQ ID NO: 451 - protein, 118 aa, Artificial Sequence
  Description of Artificial Sequence: Synthetic polypeptide
QSVLTQPPSVSGAPGQRVTISCTGSSSNIGAGYDIQWYQQLPGTAPKLLIYGYSNRPSGVPDRFSGSKSGTSASLAITGLQAEDEADYYCQSYDSSLSVYVVFGGGTQLTVLGQPKAA

SEQ ID NO: 452 - protein, 9 aa, Artificial Sequence
  Description of Artificial Sequence: Synthetic peptide
SSNIGAGYD

SEQ ID NO: 453 - protein, 3 aa, Artificial Sequence
  Description of Artificial Sequence: Synthetic peptide
GYS

SEQ ID NO: 454 - protein, 12 aa, Artificial Sequence
  Description of Artificial Sequence: Synthetic peptide
QSYDSSLSVYVV

SEQ ID NO: 455 - protein, 218 aa, Artificial Sequence
  Description of Artificial Sequence: Synthetic polypeptide
QSVLTQPPSVSGAPGQRVTISCTGSSSNIGAGYDIQWYQQLPGTAPKLLIYGYSNRPSGVPDRFSGSKSGTSASLAITGLQAEDEADYYCQSYDSSLSVYVVFGGGTQLTVLGQPKAAPSVTLFPPSSEELQANKATLVCLISDFYPGAVTVAWKADSSPVKAGVETTTPSKQSNNKYAASSYLSLTPEQWKSHRSYSCQVTHEGSTVEKTVAPTECS

SEQ ID NO: 456 - protein, 122 aa, Artificial Sequence
  Description of Artificial Sequence: Synthetic polypeptide
QVQLQESGGGVVQPGGSLRLSCAASRFTFEDYAMHWVRQPPGKGLEWVSGISWKSGGINYADSVKGRFTISRDNAQNSLYLQMNSLRAEDTALYYCVKDPTLVATDRAFNIWGQGTMVTVSS

SEQ ID NO: 457 - protein, 8 aa, Artificial Sequence
  Description of Artificial Sequence: Synthetic peptide
RFTFEDYA

SEQ ID NO: 458 - protein, 8 aa, Artificial Sequence
  Description of Artificial Sequence: Synthetic peptide
ISWKSGGI

SEQ ID NO: 459 - protein, 15 aa, Artificial Sequence
  Description of Artificial Sequence: Synthetic peptide
VKDPTLVATDRAFNI

SEQ ID NO: 460 - protein, 452 aa, Artificial Sequence
  Description of Artificial Sequence: Synthetic polypeptide
QVQLQESGGGVVQPGGSLRLSCAASRFTFEDYAMHWVRQPPGKGLEWVSGISWKSGGINYADSVKGRFTISRDNAQNSLYLQMNSLRAEDTALYYCVKDPTLVATDRAFNIWGQGTMVTVSSASTKGPSVFPLAPSSKSTSGGTAALGCLVKDYFPEPVTVSWNSGALTSGVHTFPAVLQSSGLYSLSSVVTVPSSSLGTQTYICNVNHKPSNTKVDKKVEPKSCDKTHTCPPCPAPELLGGPSVFLFPPKPKDTLMISRTPEVTCVVVDVSHEDPEVKFNWYVDGVEVHNAKTKPREEQYNSTYRVVSVLTVLHQDWLNGKEYKCKVSNKALPAPIEKTISKAKGQPREPQVYTLPPSREEMTKNQVSLTCLVKGFYPSDIAVEWESNGQPENNYKTTPPVLDSDGSFFLYSKLTVDKSRWQQGNVFSCSVMHEALHNHYTQKSLSLSPGK

SEQ ID NO: 461 - protein, 117 aa, Artificial Sequence
  Description of Artificial Sequence: Synthetic polypeptide
DVVMTQSPLSLPVTPGEPASISCRSSQSLLHSNGYNYLDWYLQKPGQSPQLLIYLGSNRASGVPDRFSGSGSGTDFTLKISRVEAEDVGVYYCMQYLQTPDTFGQGTKLEIKRAAPS

SEQ ID NO: 462 - protein, 11 aa, Artificial Sequence
  Description of Artificial Sequence: Synthetic peptide
QSLLHSNGYNY

SEQ ID NO: 463 - protein, 3 aa, Artificial Sequence
  Description of Artificial Sequence: Synthetic peptide
LGS

SEQ ID NO: 464 - protein, 9 aa, Artificial Sequence
  Description of Artificial Sequence: Synthetic peptide
MQYLQTPDT

SEQ ID NO: 465 - protein, 219 aa, Artificial Sequence
  Description of Artificial Sequence: Synthetic polypeptide
DVVMTQSPLSLPVTPGEPASISCRSSQSLLHSNGYNYLDWYLQKPGQSPQLLIYLGSNRASGVPDRFSGSGSGTDFTLKISRVEAEDVGVYYCMQYLQTPDTFGQGTKLEIKRTVAAPSVFIFPPSDEQLKSGTASVVCLLNNFYPREAKVQWKVDNALQSGNSQESVTEQDSKDSTYSLSSTLTLSKADYEKHKVYACEVTHQGLSSPVTKSFNRGEC

SEQ ID NO: 466 - protein, 129 aa, Artificial Sequence; identical to SEQ ID NO: 366
  Description of Artificial Sequence: Synthetic polypeptide

SEQ ID NO: 467 - protein, 8 aa, Artificial Sequence
  Description of Artificial Sequence: Synthetic peptide
GGTFSSSA

SEQ ID NO: 468 - protein, 8 aa, Artificial Sequence
  Description of Artificial Sequence: Synthetic peptide
IIPIYGIT

SEQ ID NO: 469 - protein, 22 aa, Artificial Sequence
  Description of Artificial Sequence: Synthetic peptide
ARDDTARRVRGVPYYYYYAMDV

SEQ ID NO: 470 - protein, 459 aa, Artificial Sequence; identical to SEQ ID NO: 370
  Description of Artificial Sequence: Synthetic polypeptide

SEQ ID NO: 471 - protein, 114 aa, Artificial Sequence
  Description of Artificial Sequence: Synthetic polypeptide
EIVLTQSPDFQSVTPKEKVTITCRASQNIDSSLHWYQQKPGQSPKLLINYASQSFSGVPSRFSGSGSGTDFTLTIDSLEPEDAATYFCHQSSSLPLTFGGGTKVEIRRTVAAPS

SEQ ID NO: 472 - protein, 6 aa, Artificial Sequence
  Description of Artificial Sequence: Synthetic peptide
QNIDSS

SEQ ID NO: 473 - protein, 3 aa, Artificial Sequence
  Description of Artificial Sequence: Synthetic peptide
YAS

SEQ ID NO: 474 - protein, 9 aa, Artificial Sequence
  Description of Artificial Sequence: Synthetic peptide
HQSSSLPLT

SEQ ID NO: 475 - protein, 218 aa, Artificial Sequence; identical to SEQ ID NO: 455
  Description of Artificial Sequence: Synthetic polypeptide

SEQ ID NO: 476 - protein, 129 aa, Artificial Sequence
  Description of Artificial Sequence: Synthetic polypeptide
EVQLVQSGAEVKKPGSSVKVSCKTSGGTFSSSAISWVRQAPGQGFEWMGGIIPIYGITDYAQKFQGRVTITTDESTSTAYMELSSLTSEDTAVYYCARDDTARRVRGVPYYYYYAMDVWGQGTTVTVSS

SEQ ID NO: 477 - protein, 8 aa, Artificial Sequence
  Description of Artificial Sequence: Synthetic peptide
GGTFSSSA

SEQ ID NO: 478 - protein, 8 aa, Artificial Sequence
  Description of Artificial Sequence: Synthetic peptide
IIPIYGIT

SEQ ID NO: 479 - protein, 22 aa, Artificial Sequence
  Description of Artificial Sequence: Synthetic peptide
ARDDTARRVRGVPYYYYYAMDV

SEQ ID NO: 480 - protein, 459 aa, Artificial Sequence
  Description of Artificial Sequence: Synthetic polypeptide
EVQLVQSGAEVKKPGSSVKVSCKTSGGTFSSSAISWVRQAPGQGFEWMGGIIPIYGITDYAQKFQGRVTITTDESTSTAYMELSSLTSEDTAVYYCARDDTARRVRGVPYYYYYAMDVWGQGTTVTVSSASTKGPSVFPLAPSSKSTSGGTAALGCLVKDYFPEPVTVSWNSGALTSGVHTFPAVLQSSGLYSLSSVVTVPSSSLGTQTYICNVNHKPSNTKVDKKVEPKSCDKTHTCPPCPAPELLGGPSVFLFPPKPKDTLMISRTPEVTCVVVDVSHEDPEVKFNWYVDGVEVHNAKTKPREEQYNSTYRVVSVLTVLHQDWLNGKEYKCKVSNKALPAPIEKTISKAKGQPREPQVYTLPPSREEMTKNQVSLTCLVKGFYPSDIAVEWESNGQPENNYKTTPPVLDSDGSFFLYSKLTVDKSRWQQGNVFSCSVMHEALHNHYTQKSLSLSPGK

SEQ ID NO: 481 - protein, 114 aa, Artificial Sequence
  Description of Artificial Sequence: Synthetic polypeptide
EIVLTQSPGTLSLSPGERATLSCRASQSVSSYLAWYQQKPGQAPRLLIYDASNRATGIPARFSGSGSGTDFTLTISSLQSEDFAVYYCQQYDDWPQTFGQGTRLEIKRTVAAPS

SEQ ID NO: 482 - protein, 6 aa, Artificial Sequence
  Description of Artificial Sequence: Synthetic peptide
QSVSSY

SEQ ID NO: 483 - protein, 3 aa, Artificial Sequence
  Description of Artificial Sequence: Synthetic peptide
DAS

SEQ ID NO: 484 - protein, 9 aa, Artificial Sequence
  Description of Artificial Sequence: Synthetic peptide
QQYDDWPQT

SEQ ID NO: 485 - protein, 214 aa, Artificial Sequence
  Description of Artificial Sequence: Synthetic polypeptide
EIVLTQSPGTLSLSPGERATLSCRASQSVSSYLAWYQQKPGQAPRLLIYDASNRATGIPARFSGSGSGTDFTLTISSLQSEDFAVYYCQQYDDWPQTFGQGTRLEIKRTVAAPSVFIFPPSDEQLKSGTASVVCLLNNFYPREAKVQWKVDNALQSGNSQESVTEQDSKDSTYSLSSTLTLSKADYEKHKVYACEVTHQGLSSPVTKSFNRGEC

SEQ ID NO: 486 - protein, 129 aa, Artificial Sequence; identical to SEQ ID NO: 426
  Description of Artificial Sequence: Synthetic polypeptide

SEQ ID NO: 487 - protein, 8 aa, Artificial Sequence
  Description of Artificial Sequence: Synthetic peptide
GGTFSSSA

SEQ ID NO: 488 - protein, 8 aa, Artificial Sequence
  Description of Artificial Sequence: Synthetic peptide
IIPIYGIT

SEQ ID NO: 489 - protein, 22 aa, Artificial Sequence
  Description of Artificial Sequence: Synthetic peptide
ARDDTARRVRGVPYYYYYAMDV

SEQ ID NO: 490 - protein, 459 aa, Artificial Sequence; identical to SEQ ID NO: 430
  Description of Artificial Sequence: Synthetic polypeptide

SEQ ID NO: 491 - protein, 114 aa, Artificial Sequence
  Description of Artificial Sequence: Synthetic polypeptide
EIVMTQSPATLSLSTGERATLFCRTSQNVYGEVAWYQQKPGQAPRLLIYDTFERAAGIPAKFSGSGSGTDFTLTISRVEPEDFAVYYCQQRRDWPITFGQGTRLEIKRTVAAPS

SEQ ID NO: 492 - protein, 6 aa, Artificial Sequence
  Description of Artificial Sequence: Synthetic peptide
QNVYGE

SEQ ID NO: 493 - protein, 3 aa, Artificial Sequence
  Description of Artificial Sequence: Synthetic peptide
DTF

SEQ ID NO: 494 - protein, 9 aa, Artificial Sequence
  Description of Artificial Sequence: Synthetic peptide
QQRRDWPIT

SEQ ID NO: 495 - protein, 214 aa, Artificial Sequence
  Description of Artificial Sequence: Synthetic polypeptide
EIVMTQSPATLSLSTGERATLFCRTSQNVYGEVAWYQQKPGQAPRLLIYDTFERAAGIPAKFSGSGSGTDFTLTISRVEPEDFAVYYCQQRRDWPITFGQGTRLEIKRTVAAPSVFIFPPSDEQLKSGTASVVCLLNNFYPREAKVQWKVDNALQSGNSQESVTEQDSKDSTYSLSSTLTLSKADYEKHKVYACEVTHQGLSSPVTKSFNRGEC

SEQ ID NO: 496 - protein, 129 aa, Artificial Sequence; identical to SEQ ID NO: 366
  Description of Artificial Sequence: Synthetic polypeptide

SEQ ID NO: 497 - protein, 8 aa, Artificial Sequence
  Description of Artificial Sequence: Synthetic peptide
GGTFSSSA

SEQ ID NO: 498 - protein, 8 aa, Artificial Sequence
  Description of Artificial Sequence: Synthetic peptide
IIPIYGIT

SEQ ID NO: 499 - protein, 22 aa, Artificial Sequence
  Description of Artificial Sequence: Synthetic peptide
ARDDTARRVRGVPYYYYYAMDV

SEQ ID NO: 500 - protein, 459 aa, Artificial Sequence; identical to SEQ ID NO: 370
  Description of Artificial Sequence: Synthetic polypeptide

SEQ ID NO: 501 - protein, 114 aa, Artificial Sequence
  Description of Artificial Sequence: Synthetic polypeptide
DIQMTQSPSSLSASVGDRVTITCQASRDISDSLSWYQQKPGKAPKLLIFDASNLKTGVSSRFSGSGSGTDFTFTISSLQPEDIATYYCHQYDNLPLTFGGGTKVEIKRTVAAPS

SEQ ID NO: 502 - protein, 6 aa, Artificial Sequence
  Description of Artificial Sequence: Synthetic peptide
RDISDS

SEQ ID NO: 503 - protein, 3 aa, Artificial Sequence
  Description of Artificial Sequence: Synthetic peptide
DAS

SEQ ID NO: 504 - protein, 9 aa, Artificial Sequence
  Description of Artificial Sequence: Synthetic peptide
HQYDNLPLT

SEQ ID NO: 505 - protein, 214 aa, Artificial Sequence
  Description of Artificial Sequence: Synthetic polypeptide
DIQMTQSPSSLSASVGDRVTITCQASRDISDSLSWYQQKPGKAPKLLIFDASNLKTGVSSRFSGSGSGTDFTFTISSLQPEDIATYYCHQYDNLPLTFGGGTKVEIKRTVAAPSVFIFPPSDEQLKSGTASVVCLLNNFYPREAKVQWKVDNALQSGNSQESVTEQDSKDSTYSLSSTLTLSKADYEKHKVYACEVTHQGLSSPVTKSFNRGEC

SEQ ID NO: 506 - protein, 129 aa, Artificial Sequence; identical to SEQ ID NO: 426
  Description of Artificial Sequence: Synthetic polypeptide

SEQ ID NO: 507 - protein, 8 aa, Artificial Sequence
  Description of Artificial Sequence: Synthetic peptide
GGTFSSSA

SEQ ID NO: 508 - protein, 8 aa, Artificial Sequence
  Description of Artificial Sequence: Synthetic peptide
IIPIYGIT

SEQ ID NO: 509 - protein, 22 aa, Artificial Sequence
  Description of Artificial Sequence: Synthetic peptide
ARDDTARRVRGVPYYYYYAMDV

SEQ ID NO: 510 - protein, 459 aa, Artificial Sequence; identical to SEQ ID NO: 430
  Description of Artificial Sequence: Synthetic polypeptide

SEQ ID NO: 511 - protein, 114 aa, Artificial Sequence
  Description of Artificial Sequence: Synthetic polypeptide
EIVMTQSPATLSLSPGERATLSCRASESVTTFLAWYQQKPGQAPRLLITDASNRATGIPGRFSGSGSGTDFTLTISSLEPEDFAVYYCHQHTNWPLTFGGGTKLEIKRTVAAPS

SEQ ID NO: 512 - protein, 6 aa, Artificial Sequence
  Description of Artificial Sequence: Synthetic peptide
ESVTTF

SEQ ID NO: 513 - protein, 3 aa, Artificial Sequence
  Description of Artificial Sequence: Synthetic peptide
DAS

SEQ ID NO: 514 - protein, 9 aa, Artificial Sequence
  Description of Artificial Sequence: Synthetic peptide
HQHTNWPLT

SEQ ID NO: 515 - protein, 214 aa, Artificial Sequence
  Description of Artificial Sequence: Synthetic polypeptide
EIVMTQSPATLSLSPGERATLSCRASESVTTFLAWYQQKPGQAPRLLITDASNRATGIPGRFSGSGSGTDFTLTISSLEPEDFAVYYCHQHTNWPLTFGGGTKLEIKRTVAAPSVFIFPPSDEQLKSGTASVVCLLNNFYPREAKVQWKVDNALQSGNSQESVTEQDSKDSTYSLSSTLTLSKADYEKHKVYACEVTHQGLSSPVTKSFNRGEC

SEQ ID NO: 516 - protein, 129 aa, Artificial Sequence
  Description of Artificial Sequence: Synthetic polypeptide
EVQLVQSGAEVKKPGASVKVSCKVSGYTLTELSMHWVRQAPGKGLEWMGGFDPEDGETIYAQKFQGRVTMTEDTSTDTAYMELSSLRSEDTAVYYCATEVGYCSGGSCYISYYYGMDVWGQGTTVTVSS

SEQ ID NO: 517 - protein, 8 aa, Artificial Sequence
  Description of Artificial Sequence: Synthetic peptide
GYTLTELS

SEQ ID NO: 518 - protein, 8 aa, Artificial Sequence
  Description of Artificial Sequence: Synthetic peptide
FDPEDGET

SEQ ID NO: 519 - protein, 22 aa, Artificial Sequence
  Description of Artificial Sequence: Synthetic peptide
ATEVGYCSGGSCYISYYYGMDV

SEQ ID NO: 520 - protein, 459 aa, Artificial Sequence
  Description of Artificial Sequence: Synthetic polypeptide
EVQLVQSGAEVKKPGASVKVSCKVSGYTLTELSMHWVRQAPGKGLEWMGGFDPEDGETIYAQKFQGRVTMTEDTSTDTAYMELSSLRSEDTAVYYCATEVGYCSGGSCYISYYYGMDVWGQGTTVTVSSASTKGPSVFPLAPSSKSTSGGTAALGCLVKDYFPEPVTVSWNSGALTSGVHTFPAVLQSSGLYSLSSVVTVPSSSLGTQTYICNVNHKPSNTKVDKKVEPKSCDKTHTCPPCPAPELLGGPSVFLFPPKPKDTLMISRTPEVTCVVVDVSHEDPEVKFNWYVDGVEVHNAKTKPREEQYNSTYRVVSVLTVLHQDWLNGKEYKCKVSNKALPAPIEKTISKAKGQPREPQVYTLPPSREEMTKNQVSLTCLVKGFYPSDIAVEWESNGQPENNYKTTPPVLDSDGSFFLYSKLTVDKSRWQQGNVFSCSVMHEALHNHYTQKSLSLSPGK

SEQ ID NO: 521 - protein, 119 aa, Artificial Sequence
  Description of Artificial Sequence: Synthetic polypeptide
DVVMTQSPLSLPVTPGEPASISCRSSQSLLYRNGHNFLDWYVQKPGQSPQLLIYLGSNRASGVPDRFSGSGSGTDFTLKISRVEAEDVGVYYCMQALQTPPTFGQGTKLEIKRTVAAPS

SEQ ID NO: 522 - protein, 11 aa, Artificial Sequence
  Description of Artificial Sequence: Synthetic peptide
QSLLYRNGHNF

SEQ ID NO: 523 - protein, 3 aa, Artificial Sequence
  Description of Artificial Sequence: Synthetic peptide
LGS

SEQ ID NO: 524 - protein, 9 aa, Artificial Sequence
  Description of Artificial Sequence: Synthetic peptide
MQALQTPPT

SEQ ID NO: 525 - protein, 219 aa, Artificial Sequence
  Description of Artificial Sequence: Synthetic polypeptide
DVVMTQSPLSLPVTPGEPASISCRSSQSLLYRNGHNFLDWYVQKPGQSPQLLIYLGSNRASGVPDRFSGSGSGTDFTLKISRVEAEDVGVYYCMQALQTPPTFGQGTKLEIKRTVAAPSVFIFPPSDEQLKSGTASVVCLLNNFYPREAKVQWKVDNALQSGNSQESVTEQDSKDSTYSLSSTLTLSKADYEKHKVYACEVTHQGLSSPVTKSFNRGEC

SEQ ID NO: 526 - protein, 8 aa, Artificial Sequence
  Description of Artificial Sequence: Synthetic peptide
GGTFSSYA

SEQ ID NO: 527 - protein, 8 aa, Artificial Sequence
  Description of Artificial Sequence: Synthetic peptide
IIPIFGTA

SEQ ID NO: 528 - protein, 13 aa, Artificial Sequence
  Description of Artificial Sequence: Synthetic peptide
AREEVSSPYGMDV

SEQ ID NO: 529 - protein, 9 aa, Artificial Sequence
  Description of Artificial Sequence: Synthetic peptide
TGAVTSGHY

SEQ ID NO: 530 - protein, 3 aa, Artificial Sequence
  Description of Artificial Sequence: Synthetic peptide
DTG

SEQ ID NO: 531 - protein, 10 aa, Artificial Sequence
  Description of Artificial Sequence: Synthetic peptide
LLSYSGASWV

SEQ ID NO: 532 - protein, 8 aa, Artificial Sequence
  Description of Artificial Sequence: Synthetic peptide
GGTFSSSA

SEQ ID NO: 533 - protein, 8 aa, Artificial Sequence
  Description of Artificial Sequence: Synthetic peptide
IIPIYGIT

SEQ ID NO: 534 - protein, 22 aa, Artificial Sequence
  Description of Artificial Sequence: Synthetic peptide
ARDDTARRVRGVPYYYYYAMDV

SEQ ID NO: 535 - protein, 6 aa, Artificial Sequence
  Description of Artificial Sequence: Synthetic peptide
QGIGNY

SEQ ID NO: 536 - protein, 3 aa, Artificial Sequence
  Description of Artificial Sequence: Synthetic peptide
SAS

SEQ ID NO: 537 - protein, 9 aa, Artificial Sequence
  Description of Artificial Sequence: Synthetic peptide
QQLKDYPIT

SEQ ID NO: 538 - protein, 8 aa, Artificial Sequence
  Description of Artificial Sequence: Synthetic peptide
GFSLSHFS

SEQ ID NO: 539 - protein, 8 aa, Artificial Sequence
  Description of Artificial Sequence: Synthetic peptide
FDPEEGGT

SEQ ID NO: 540 - protein, 14 aa, Artificial Sequence
  Description of Artificial Sequence: Synthetic peptide
ATGIWYSSGWPVDY

SEQ ID NO: 541 - protein, 11 aa, Artificial Sequence
  Description of Artificial Sequence: Synthetic peptide
QSLLDSSGYNY

SEQ ID NO: 542 - protein, 3 aa, Artificial Sequence
  Description of Artificial Sequence: Synthetic peptide
LGS

SEQ ID NO: 543 - protein, 9 aa, Artificial Sequence
  Description of Artificial Sequence: Synthetic peptide
MQALQTPIT

SEQ ID NO: 544 - protein, 8 aa, Artificial Sequence
  Description of Artificial Sequence: Synthetic peptide
GYTLTELS

SEQ ID NO: 545 - protein, 8 aa, Artificial Sequence
  Description of Artificial Sequence: Synthetic peptide
FDPEDGET

SEQ ID NO: 546 - protein, 18 aa, Artificial Sequence
  Description of Artificial Sequence: Synthetic peptide
ATVSRVRGVINYYYYMDV

SEQ ID NO: 547 - protein, 11 aa, Artificial Sequence
  Description of Artificial Sequence: Synthetic peptide
QSLLYRNGNNY

SEQ ID NO: 548 - protein, 3 aa, Artificial Sequence
  Description of Artificial Sequence: Synthetic peptide
LGS

SEQ ID NO: 549 - protein, 9 aa, Artificial Sequence
  Description of Artificial Sequence: Synthetic peptide
MQALQTPPT

SEQ ID NO: 550 - protein, 8 aa, Artificial Sequence
  Description of Artificial Sequence: Synthetic peptide
GGTFSSSA

SEQ ID NO: 551 - protein, 8 aa, Artificial Sequence
  Description of Artificial Sequence: Synthetic peptide
IIPIYGIT

SEQ ID NO: 552 - protein, 22 aa, Artificial Sequence
  Description of Artificial Sequence: Synthetic peptide
ARDDTARRVRGVPYYYYYAMDV

SEQ ID NO: 553 - protein, 6 aa, Artificial Sequence
  Description of Artificial Sequence: Synthetic peptide
QSVDSS

SEQ ID NO: 554 - protein, 3 aa, Artificial Sequence
  Description of Artificial Sequence: Synthetic peptide
DAS

SEQ ID NO: 555 - protein, 9 aa, Artificial Sequence
  Description of Artificial Sequence: Synthetic peptide
QQYKDWPFT

SEQ ID NO: 556 - protein, 8 aa, Artificial Sequence
  Description of Artificial Sequence: Synthetic peptide
GGTFGTYA

SEQ ID NO: 557 - protein, 8 aa, Artificial Sequence
  Description of Artificial Sequence: Synthetic peptide
ITPISATI

SEQ ID NO: 558 - protein, 13 aa, Artificial Sequence
  Description of Artificial Sequence: Synthetic peptide
ARGFEYSDGLLDD

SEQ ID NO: 559 - protein, 12 aa, Artificial Sequence
  Description of Artificial Sequence: Synthetic peptide
QSLFYSDDGNTY

SEQ ID NO: 560 - protein, 3 aa, Artificial Sequence
  Description of Artificial Sequence: Synthetic peptide
RLS

SEQ ID NO: 561 - protein, 9 aa, Artificial Sequence
  Description of Artificial Sequence: Synthetic peptide
MQHMEFPLT

SEQ ID NO: 562 - protein, 10 aa, Artificial Sequence
  Description of Artificial Sequence: Synthetic peptide
GGSISSSSYY

SEQ ID NO: 563 - protein, 7 aa, Artificial Sequence
  Description of Artificial Sequence: Synthetic peptide
IYYSGST

SEQ ID NO: 564 - protein, 15 aa, Artificial Sequence
  Description of Artificial Sequence: Synthetic peptide
ARGAWELRLGDWFDP

SEQ ID NO: 565 - protein, 9 aa, Artificial Sequence
  Description of Artificial Sequence: Synthetic peptide
SSNIGAGYD

SEQ ID NO: 566 - protein, 3 aa, Artificial Sequence
  Description of Artificial Sequence: Synthetic peptide
GNN

SEQ ID NO: 567 - protein, 12 aa, Artificial Sequence
  Description of Artificial Sequence: Synthetic peptide
QSYDSSLSIYVV

SEQ ID NO: 568 - protein, 9 aa, Artificial Sequence
  Description of Artificial Sequence: Synthetic peptide
SGSISSTNW

SEQ ID NO: 569 - protein, 7 aa, Artificial Sequence
  Description of Artificial Sequence: Synthetic peptide
IYHSGST

SEQ ID NO: 570 - protein, 10 aa, Artificial Sequence
  Description of Artificial Sequence: Synthetic peptide
ARVGPAAIYY

SEQ ID NO: 571 - protein, 8 aa, Artificial Sequence
  Description of Artificial Sequence: Synthetic peptide
SNNVGYEG

SEQ ID NO: 572 - protein, 3 aa, Artificial Sequence
  Description of Artificial Sequence: Synthetic peptide
RNN

SEQ ID NO: 573 - protein, 11 aa, Artificial Sequence
  Description of Artificial Sequence: Synthetic peptide
SAWDSSLNAVV

SEQ ID NO: 574 - protein, 8 aa, Artificial Sequence
  Description of Artificial Sequence: Synthetic peptide
GYTLTELS

SEQ ID NO: 575 - protein, 8 aa, Artificial Sequence
  Description of Artificial Sequence: Synthetic peptide
FDPEDGET

SEQ ID NO: 576 - protein, 21 aa, Artificial Sequence
  Description of Artificial Sequence: Synthetic peptide
ATAKPGIAVAGQNYYYYYMDV

SEQ ID NO: 577 - protein, 11 aa, Artificial Sequence
  Description of Artificial Sequence: Synthetic peptide
QSLLYRNGNNY

SEQ ID NO: 578 - protein, 3 aa, Artificial Sequence
  Description of Artificial Sequence: Synthetic peptide
LGS

SEQ ID NO: 579 - protein, 9 aa, Artificial Sequence
  Description of Artificial Sequence: Synthetic peptide
MQALQTPPT

SEQ ID NO: 580 - protein, 8 aa, Artificial Sequence
  Description of Artificial Sequence: Synthetic peptide
GFTFSSYA

SEQ ID NO: 581 - protein, 8 aa, Artificial Sequence
  Description of Artificial Sequence: Synthetic peptide
ISYDGSNK

SEQ ID NO: 582 - protein, 17 aa, Artificial Sequence
  Description of Artificial Sequence: Synthetic peptide
ASSPIGYSYGYWGGMDV

SEQ ID NO: 583 - protein, 9 aa, Artificial Sequence
  Description of Artificial Sequence: Synthetic peptide
SGIDVRTNK

SEQ ID NO: 584 - protein, 7 aa, Artificial Sequence
  Description of Artificial Sequence: Synthetic peptide
FQSDSDK

SEQ ID NO: 585 - protein, 9 aa, Artificial Sequence
  Description of Artificial Sequence: Synthetic peptide
LIWHTSGWV

SEQ ID NO: 586 - protein, 8 aa, Artificial Sequence
  Description of Artificial Sequence: Synthetic peptide
GYTLTELS

SEQ ID NO: 587 - protein, 8 aa, Artificial Sequence
  Description of Artificial Sequence: Synthetic peptide
FDPEDGET

SEQ ID NO: 588 - protein, 17 aa, Artificial Sequence
  Description of Artificial Sequence: Synthetic peptide
ATGPAAAGVGYYYYMDV

SEQ ID NO: 589 - protein, 11 aa, Artificial Sequence
  Description of Artificial Sequence: Synthetic peptide
QSLLYRNGYNY

SEQ ID NO: 590 - protein, 3 aa, Artificial Sequence
  Description of Artificial Sequence: Synthetic peptide
LGS

SEQ ID NO: 591 - protein, 9 aa, Artificial Sequence
  Description of Artificial Sequence: Synthetic peptide
MQALQTPPT

SEQ ID NO: 592 - protein, 8 aa, Artificial Sequence
  Description of Artificial Sequence: Synthetic peptide
GFTFSSYA

SEQ ID NO: 593 - protein, 8 aa, Artificial Sequence
  Description of Artificial Sequence: Synthetic peptide
ISYDGSNK

SEQ ID NO: 594 - protein, 20 aa, Artificial Sequence
  Description of Artificial Sequence: Synthetic peptide
ARDVMVYCSSTSCYFYGMDV

SEQ ID NO: 595 - protein, 6 aa, Artificial Sequence
  Description of Artificial Sequence: Synthetic peptide
QDIRDY

SEQ ID NO: 596 - protein, 3 aa, Artificial Sequence
  Description of Artificial Sequence: Synthetic peptide
DAS

SEQ ID NO: 597 - protein, 9 aa, Artificial Sequence
  Description of Artificial Sequence: Synthetic peptide
QQFENLPIT

SEQ ID NO: 598 - protein, 8 aa, Artificial Sequence
  Description of Artificial Sequence: Synthetic peptide
GYTLTELS

SEQ ID NO: 599 - protein, 8 aa, Artificial Sequence
  Description of Artificial Sequence: Synthetic peptide
FDPEDGET

SEQ ID NO: 600 - protein, 18 aa, Artificial Sequence
  Description of Artificial Sequence: Synthetic peptide
ATGGYSSGFNYYYYYMDV

SEQ ID NO: 601 - protein, 11 aa, Artificial Sequence
  Description of Artificial Sequence: Synthetic peptide
QSLLYRNGNNY

SEQ ID NO: 602 - protein, 3 aa, Artificial Sequence
  Description of Artificial Sequence: Synthetic peptide
LGS

SEQ ID NO: 603 - protein, 9 aa, Artificial Sequence
  Description of Artificial Sequence: Synthetic peptide
MQALQTPPT

SEQ ID NO: 604 - protein, 8 aa, Artificial Sequence
  Description of Artificial Sequence: Synthetic peptide
GYTLTELS

SEQ ID NO: 605 - protein, 8 aa, Artificial Sequence
  Description of Artificial Sequence: Synthetic peptide
FDPEDGET

SEQ ID NO: 606 - protein, 14 aa, Artificial Sequence
  Description of Artificial Sequence: Synthetic peptide
ATGVTTYYYYGMDV

SEQ ID NO: 607 - protein, 11 aa, Artificial Sequence
  Description of Artificial Sequence: Synthetic peptide
QSLLYSNGNNF

SEQ ID NO: 608 - protein, 3 aa, Artificial Sequence
  Description of Artificial Sequence: Synthetic peptide
LGS

SEQ ID NO: 609 - protein, 9 aa, Artificial Sequence
  Description of Artificial Sequence: Synthetic peptide
MQALQTPPT

SEQ ID NO: 610 - protein, 8 aa, Artificial Sequence
  Description of Artificial Sequence: Synthetic peptide
GFTFSSYG

SEQ ID NO: 611 - protein, 8 aa, Artificial Sequence
  Description of Artificial Sequence: Synthetic peptide
IRYDGSNK

SEQ ID NO: 612 - protein, 14 aa, Artificial Sequence
  Description of Artificial Sequence: Synthetic peptide
ARDLFDFWWDGMDV

SEQ ID NO: 613 - protein, 7 aa, Artificial Sequence
  Description of Artificial Sequence: Synthetic peptide
QSVSSMY

SEQ ID NO: 614 - protein, 3 aa, Artificial Sequence
  Description of Artificial Sequence: Synthetic peptide
GAS

SEQ ID NO: 615 - protein, 10 aa, Artificial Sequence
  Description of Artificial Sequence: Synthetic peptide
QQYVSSPMYT

SEQ ID NO: 616 - protein, 8 aa, Artificial Sequence
  Description of Artificial Sequence: Synthetic peptide
GGTFSSSA

SEQ ID NO: 617 - protein, 8 aa, Artificial Sequence
  Description of Artificial Sequence: Synthetic peptide
IIPIYGIT

SEQ ID NO: 618 - protein, 22 aa, Artificial Sequence
  Description of Artificial Sequence: Synthetic peptide
ARDDTARRVRGVPYYYYYAMDV

SEQ ID NO: 619 - protein, 6 aa, Artificial Sequence
  Description of Artificial Sequence: Synthetic peptide
QSVSSY

SEQ ID NO: 620 - protein, 3 aa, Artificial Sequence
  Description of Artificial Sequence: Synthetic peptide
DAS

SEQ ID NO: 621 - protein, 9 aa, Artificial Sequence
  Description of Artificial Sequence: Synthetic peptide
QQYDDWPQT

SEQ ID NO: 622 - protein, 8 aa, Artificial Sequence
  Description of Artificial Sequence: Synthetic peptide
GGTFNNYG

SEQ ID NO: 623 - protein, 8 aa, Artificial Sequence
  Description of Artificial Sequence: Synthetic peptide
IIPLFGTT

SEQ ID NO: 624 - protein, 15 aa, Artificial Sequence
  Description of Artificial Sequence: Synthetic peptide
ARDRMAADGMAVFDY

SEQ ID NO: 625 - protein, 8 aa, Artificial Sequence
  Description of Artificial Sequence: Synthetic peptide
SSNIGRHF

SEQ ID NO: 626 - protein, 3 aa, Artificial Sequence
  Description of Artificial Sequence: Synthetic peptide
KND

SEQ ID NO: 627 - protein, 11 aa, Artificial Sequence
  Description of Artificial Sequence: Synthetic peptide
SSWDAALNGVV

SEQ ID NO: 628 - protein, 8 aa, Artificial Sequence
  Description of Artificial Sequence: Synthetic peptide
GYTLTELS

SEQ ID NO: 629 - protein, 8 aa, Artificial Sequence
  Description of Artificial Sequence: Synthetic peptide
FDPEDGET

SEQ ID NO: 630 - protein, 19 aa, Artificial Sequence
  Description of Artificial Sequence: Synthetic peptide
ATEVPMVRGARRYYYYMDV

SEQ ID NO: 631 - protein, 11 aa, Artificial Sequence
  Description of Artificial Sequence: Synthetic peptide
QTLLYINENNY

SEQ ID NO: 632 - protein, 3 aa, Artificial Sequence
  Description of Artificial Sequence: Synthetic peptide
LGS

SEQ ID NO: 633 - protein, 9 aa, Artificial Sequence
  Description of Artificial Sequence: Synthetic peptide
MQGLQTPPT

SEQ ID NO: 634 - protein, 10 aa, Artificial Sequence
  Description of Artificial Sequence: Synthetic peptide
GGSISNSNYY

SEQ ID NO: 635 - protein, 7 aa, Artificial Sequence
  Description of Artificial Sequence: Synthetic peptide
IYYSGST

SEQ ID NO: 636 - protein, 15 aa, Artificial Sequence
  Description of Artificial Sequence: Synthetic peptide
ARGAWELSLGDWFDP

SEQ ID NO: 637 - protein, 9 aa, Artificial Sequence
  Description of Artificial Sequence: Synthetic peptide
SSNIGAGYD

SEQ ID NO: 638 - protein, 3 aa, Artificial Sequence
  Description of Artificial Sequence: Synthetic peptide
GNN

SEQ ID NO: 639 - protein, 12 aa, Artificial Sequence
  Description of Artificial Sequence: Synthetic peptide
QSYDSSLSVYVV

SEQ ID NO: 640 - protein, 8 aa, Artificial Sequence
  Description of Artificial Sequence: Synthetic peptide
GGTFSSSA

SEQ ID NO: 641 - protein, 8 aa, Artificial Sequence
  Description of Artificial Sequence: Synthetic peptide
IIPIYGIT

SEQ ID NO: 642 - protein, 22 aa, Artificial Sequence
  Description of Artificial Sequence: Synthetic peptide
ARDDTARRVRGVPYYYYYAMDV

SEQ ID NO: 643 - protein, 6 aa, Artificial Sequence
  Description of Artificial Sequence: Synthetic peptide
QNVYGE

SEQ ID NO: 644 - protein, 3 aa, Artificial Sequence
  Description of Artificial Sequence: Synthetic peptide
DTF

SEQ ID NO: 645 - protein, 9 aa, Artificial Sequence
  Description of Artificial Sequence: Synthetic peptide
QQRRDWPIT

SEQ ID NO: 646 - protein, 8 aa, Artificial Sequence
  Description of Artificial Sequence: Synthetic peptide
GFTFGTSS

SEQ ID NO: 647 - protein, 8 aa, Artificial Sequence
  Description of Artificial Sequence: Synthetic peptide
ISFDGTEI

SEQ ID NO: 648 - protein, 15 aa, Artificial Sequence
  Description of Artificial Sequence: Synthetic peptide
AKGSGNIYFYSGMDV

SEQ ID NO: 649 - protein, 6 aa, Artificial Sequence
  Description of Artificial Sequence: Synthetic peptide
QSISGW

SEQ ID NO: 650 - protein, 3 aa, Artificial Sequence
  Description of Artificial Sequence: Synthetic peptide
ETS

SEQ ID NO: 651 - protein, 9 aa, Artificial Sequence
  Description of Artificial Sequence: Synthetic peptide
QQYYSYPLT

SEQ ID NO: 652 - protein, 8 aa, Artificial Sequence
  Description of Artificial Sequence: Synthetic peptide
GYTLTELS

SEQ ID NO: 653 - protein, 8 aa, Artificial Sequence
  Description of Artificial Sequence: Synthetic peptide
FDPEDGET

SEQ ID NO: 654 - protein, 19 aa, Artificial Sequence
  Description of Artificial Sequence: Synthetic peptide
ATGVPAAIGVYYYYYYMDV

SEQ ID NO: 655 - protein, 11 aa, Artificial Sequence
  Description of Artificial Sequence: Synthetic peptide
QSLLYSNGYNY

SEQ ID NO: 656 - protein, 3 aa, Artificial Sequence
  Description of Artificial Sequence: Synthetic peptide
LGS

SEQ ID NO: 657 - protein, 9 aa, Artificial Sequence
  Description of Artificial Sequence: Synthetic peptide
MQALQSPVT

SEQ ID NO: 658 - protein, 8 aa, Artificial Sequence
  Description of Artificial Sequence: Synthetic peptide
GYTLTELS

SEQ ID NO: 659 - protein, 8 aa, Artificial Sequence
  Description of Artificial Sequence: Synthetic peptide
FDPEDGET

SEQ ID NO: 660 - protein, 20 aa, Artificial Sequence
  Description of Artificial Sequence: Synthetic peptide
ATDSRDGPAARGGYYYYMDV

SEQ ID NO: 661 - protein, 11 aa, Artificial Sequence
  Description of Artificial Sequence: Synthetic peptide
QSLLYINGYNY

SEQ ID NO: 662 - protein, 3 aa, Artificial Sequence
  Description of Artificial Sequence: Synthetic peptide
LGS

SEQ ID NO: 663 - protein, 9 aa, Artificial Sequence
  Description of Artificial Sequence: Synthetic peptide
MQALQTPPT

SEQ ID NO: 664 - protein, 8 aa, Artificial Sequence
  Description of Artificial Sequence: Synthetic peptide
GGTFSSYA

SEQ ID NO: 665 - protein, 8 aa, Artificial Sequence
  Description of Artificial Sequence: Synthetic peptide
IIPIFGTA

SEQ ID NO: 666 - protein, 20 aa, Artificial Sequence
  Description of Artificial Sequence: Synthetic peptide
ARDAYYYDSSGYYNPDAFDI

SEQ ID NO: 667 - protein, 11 aa, Artificial Sequence
  Description of Artificial Sequence: Synthetic peptide
QSLLHSNGYNY

SEQ ID NO: 668 - protein, 3 aa, Artificial Sequence
  Description of Artificial Sequence: Synthetic peptide
LGS

SEQ ID NO: 669 - protein, 9 aa, Artificial Sequence
  Description of Artificial Sequence: Synthetic peptide
MQGLQTPRT

SEQ ID NO: 670 - protein, 10 aa, Artificial Sequence
  Description of Artificial Sequence: Synthetic peptide
GFSLTSGGMS

SEQ ID NO: 671 - protein, 7 aa, Artificial Sequence
  Description of Artificial Sequence: Synthetic peptide
IDWNDDK

SEQ ID NO: 672 - protein, 12 aa, Artificial Sequence
  Description of Artificial Sequence: Synthetic peptide
ARIRGMTWGFDS

SEQ ID NO: 673 - protein, 7 aa, Artificial Sequence
  Description of Artificial Sequence: Synthetic peptide
QSVSSSY

SEQ ID NO: 674 - protein, 3 aa, Artificial Sequence
  Description of Artificial Sequence: Synthetic peptide
GAS

SEQ ID NO: 675 - protein, 9 aa, Artificial Sequence
  Description of Artificial Sequence: Synthetic peptide
QQYGTTPFA

SEQ ID NO: 676 - protein, 8 aa, Artificial Sequence
  Description of Artificial Sequence: Synthetic peptide
GYTFTAYY

SEQ ID NO: 677 - protein, 8 aa, Artificial Sequence
  Description of Artificial Sequence: Synthetic peptide
INPNSGGT

SEQ ID NO: 678 - protein, 21 aa, Artificial Sequence
  Description of Artificial Sequence: Synthetic peptide
ARDGAFYYGSENYYNAGWFDP

SEQ ID NO: 679 - protein, 11 aa, Artificial Sequence
  Description of Artificial Sequence: Synthetic peptide
QSLLSGNGYNY

SEQ ID NO: 680 - protein, 3 aa, Artificial Sequence
  Description of Artificial Sequence: Synthetic peptide
LGS

SEQ ID NO: 681 - protein, 9 aa, Artificial Sequence
  Description of Artificial Sequence: Synthetic peptide
MQALKSPLT

SEQ ID NO: 682 - protein, 8 aa, Artificial Sequence
  Description of Artificial Sequence: Synthetic peptide
GYTFTNYY

SEQ ID NO: 683 - protein, 8 aa, Artificial Sequence
  Description of Artificial Sequence: Synthetic peptide
INPSGGIT

SEQ ID NO: 684 - protein, 18 aa, Artificial Sequence
  Description of Artificial Sequence: Synthetic peptide
ARAGLGYNWNYAPSGMDV

SEQ ID NO: 685 - protein, 9 aa, Artificial Sequence
  Description of Artificial Sequence: Synthetic peptide
SSDVGGYNY

SEQ ID NO: 686 - protein, 3 aa, Artificial Sequence
  Description of Artificial Sequence: Synthetic peptide
EVS

SEQ ID NO: 687 - protein, 10 aa, Artificial Sequence
  Description of Artificial Sequence: Synthetic peptide
SSYAGSNNLV

SEQ ID NO: 688 - protein, 10 aa, Artificial Sequence
  Description of Artificial Sequence: Synthetic peptide
GGSISSSSYY

SEQ ID NO: 689 - protein, 7 aa, Artificial Sequence
  Description of Artificial Sequence: Synthetic peptide
IYYSGST

SEQ ID NO: 690 - protein, 15 aa, Artificial Sequence
  Description of Artificial Sequence: Synthetic peptide
ARGAWELRLGDWFDP

SEQ ID NO: 691 - protein, 9 aa, Artificial Sequence
  Description of Artificial Sequence: Synthetic peptide
SSNIGAGYD

SEQ ID NO: 692 - protein, 3 aa, Artificial Sequence
  Description of Artificial Sequence: Synthetic peptide
GYS

SEQ ID NO: 693 - protein, 12 aa, Artificial Sequence
  Description of Artificial Sequence: Synthetic peptide
QSYDSSLSVYVV

SEQ ID NO: 694 - protein, 8 aa, Artificial Sequence
  Description of Artificial Sequence: Synthetic peptide
GFTFDDYA

SEQ ID NO: 695 - protein, 8 aa, Artificial Sequence
  Description of Artificial Sequence: Synthetic peptide
ISWNSGSI

SEQ ID NO: 696 - protein, 15 aa, Artificial Sequence
  Description of Artificial Sequence: Synthetic peptide
AKDVNRILVAGMVDY

SEQ ID NO: 697 - protein, 11 aa, Artificial Sequence
  Description of Artificial Sequence: Synthetic peptide
QSLLHSNGYNY

SEQ ID NO: 698 - protein, 3 aa, Artificial Sequence
  Description of Artificial Sequence: Synthetic peptide
LGS

SEQ ID NO: 699 - protein, 9 aa, Artificial Sequence
  Description of Artificial Sequence: Synthetic peptide
MQGLQTPIT

SEQ ID NO: 700 - protein, 8 aa, Artificial Sequence
  Description of Artificial Sequence: Synthetic peptide
RFTFEDYA

SEQ ID NO: 701 - protein, 8 aa, Artificial Sequence
  Description of Artificial Sequence: Synthetic peptide
ISWKSGGI

SEQ ID NO: 702 - protein, 15 aa, Artificial Sequence
  Description of Artificial Sequence: Synthetic peptide
VKDPTLVATDRAFNI

SEQ ID NO: 703 - protein, 11 aa, Artificial Sequence
  Description of Artificial Sequence: Synthetic peptide
QSLLHSNGYNY

SEQ ID NO: 704 - protein, 3 aa, Artificial Sequence
  Description of Artificial Sequence: Synthetic peptide
LGS

SEQ ID NO: 705 - protein, 9 aa, Artificial Sequence
  Description of Artificial Sequence: Synthetic peptide
MQYLQTPDT

SEQ ID NO: 706 - protein, 8 aa, Artificial Sequence
  Description of Artificial Sequence: Synthetic peptide
GGTFSSSA

SEQ ID NO: 707 - protein, 8 aa, Artificial Sequence
  Description of Artificial Sequence: Synthetic peptide
IIPIYGIT

SEQ ID NO: 708 - protein, 22 aa, Artificial Sequence
  Description of Artificial Sequence: Synthetic peptide
ARDDTARRVRGVPYYYYYAMDV

SEQ ID NO: 709 - protein, 12 aa, Artificial Sequence
  Description of Artificial Sequence: Synthetic peptide
QSLLDSDDGNIH

SEQ ID NO: 710 - protein, 3 aa, Artificial Sequence
  Description of Artificial Sequence: Synthetic peptide
TLS

SEQ ID NO: 711 - protein, 9 aa, Artificial Sequence
  Description of Artificial Sequence: Synthetic peptide
MQRKEFPLT

SEQ ID NO: 712 - protein, 8 aa, Artificial Sequence
  Description of Artificial Sequence: Synthetic peptide
GFTFSSYG

SEQ ID NO: 713 - protein, 8 aa, Artificial Sequence
  Description of Artificial Sequence: Synthetic peptide
ISYDGSNK

SEQ ID NO: 714 - protein, 18 aa, Artificial Sequence
  Description of Artificial Sequence: Synthetic peptide
AKEDRLRFLEWLFYGMDV

SEQ ID NO: 715 - protein, 6 aa, Artificial Sequence
  Description of Artificial Sequence: Synthetic peptide
HDIYTY

SEQ ID NO: 716 - protein, 3 aa, Artificial Sequence
  Description of Artificial Sequence: Synthetic peptide
DAS

SEQ ID NO: 717 - protein, 11 aa, Artificial Sequence
  Description of Artificial Sequence: Synthetic peptide
QQYDNHPPEVT

SEQ ID NO: 718 - protein, 8 aa, Artificial Sequence
  Description of Artificial Sequence: Synthetic peptide
GGTFSSSA

SEQ ID NO: 719 - protein, 8 aa, Artificial Sequence
  Description of Artificial Sequence: Synthetic peptide
IIPIYGIT

SEQ ID NO: 720 - protein, 22 aa, Artificial Sequence
  Description of Artificial Sequence: Synthetic peptide
ARDDTARRVRGVPYYYYYAMDV

SEQ ID NO: 721 - protein, 6 aa, Artificial Sequence
  Description of Artificial Sequence: Synthetic peptide
QDIDDD

SEQ ID NO: 722 - protein, 3 aa, Artificial Sequence
  Description of Artificial Sequence: Synthetic peptide
EAS

SEQ ID NO: 723 - protein, 9 aa, Artificial Sequence
  Description of Artificial Sequence: Synthetic peptide
LQHDNLPLT

SEQ ID NO: 724 - protein, 8 aa, Artificial Sequence
  Description of Artificial Sequence: Synthetic peptide
GYTLTELS

SEQ ID NO: 725 - protein, 8 aa, Artificial Sequence
  Description of Artificial Sequence: Synthetic peptide
FDPEDGET

SEQ ID NO: 726 - protein, 19 aa, Artificial Sequence
  Description of Artificial Sequence: Synthetic peptide
ATEDPGPVAGPYYYYGMDV

SEQ ID NO: 727 - protein, 11 aa, Artificial Sequence
  Description of Artificial Sequence: Synthetic peptide
QSLLYINGYHY

SEQ ID NO: 728 - protein, 3 aa, Artificial Sequence
  Description of Artificial Sequence: Synthetic peptide
LGS

SEQ ID NO: 729 - protein, 9 aa, Artificial Sequence
  Description of Artificial Sequence: Synthetic peptide
MQALQTPPT

SEQ ID NO: 730 - protein, 8 aa, Artificial Sequence
  Description of Artificial Sequence: Synthetic peptide
GYMFTNYP

SEQ ID NO: 731 - protein, 8 aa, Artificial Sequence
  Description of Artificial Sequence: Synthetic peptide
INAGTGNT

SEQ ID NO: 732 - protein, 21 aa, Artificial Sequence
  Description of Artificial Sequence: Synthetic peptide
AREGMFYYGLESYYKGGWFDP

SEQ ID NO: 733 - protein, 11 aa, Artificial Sequence
  Description of Artificial Sequence: Synthetic peptide
QSLLHRNGYNY

SEQ ID NO: 734 - protein, 3 aa, Artificial Sequence
  Description of Artificial Sequence: Synthetic peptide
LAS

SEQ ID NO: 735 - protein, 9 aa, Artificial Sequence
  Description of Artificial Sequence: Synthetic peptide
MQALQTPLT

SEQ ID NO: 736 - protein, 8 aa, Artificial Sequence
  Description of Artificial Sequence: Synthetic peptide
GGTFSSSA

SEQ ID NO: 737 - protein, 8 aa, Artificial Sequence
  Description of Artificial Sequence: Synthetic peptide
IIPIYGIT

SEQ ID NO: 738 - protein, 22 aa, Artificial Sequence
  Description of Artificial Sequence: Synthetic peptide
ARDDTARRVRGVPYYYYYAMDV

SEQ ID NO: 739 - protein, 12 aa, Artificial Sequence
  Description of Artificial Sequence: Synthetic peptide
QSLLDSDDGNTY

SEQ ID NO: 740 - protein, 3 aa, Artificial Sequence
  Description of Artificial Sequence: Synthetic peptide
TLS

SEQ ID NO: 741 - protein, 9 aa, Artificial Sequence
  Description of Artificial Sequence: Synthetic peptide
MQRLQFPLT

SEQ ID NO: 742 - protein, 8 aa, Artificial Sequence
  Description of Artificial Sequence: Synthetic peptide
TYTFTTYY

SEQ ID NO: 743 - protein, 8 aa, Artificial Sequence
  Description of Artificial Sequence: Synthetic peptide
IYPSGGNT

SEQ ID NO: 744 - protein, 13 aa, Artificial Sequence
  Description of Artificial Sequence: Synthetic peptide
VRDQNYYYSAMDV

SEQ ID NO: 745 - protein, 6 aa, Artificial Sequence
  Description of Artificial Sequence: Synthetic peptide
QDIRNY

SEQ ID NO: 746 - protein, 3 aa, Artificial Sequence
  Description of Artificial Sequence: Synthetic peptide
DAS

SEQ ID NO: 747 - protein, 9 aa, Artificial Sequence
  Description of Artificial Sequence: Synthetic peptide
QQFENLPIT

SEQ ID NO: 748 - protein, 8 aa, Artificial Sequence
  Description of Artificial Sequence: Synthetic peptide
GGTFSSSA

SEQ ID NO: 749 - protein, 8 aa, Artificial Sequence
  Description of Artificial Sequence: Synthetic peptide
IIPIYGIT

SEQ ID NO: 750 - protein, 22 aa, Artificial Sequence
  Description of Artificial Sequence: Synthetic peptide
ARDDTARRVRGVPYYYYYAMDV

SEQ ID NO: 751 - protein, 6 aa, Artificial Sequence
  Description of Artificial Sequence: Synthetic peptide
RDISDS

SEQ ID NO: 752 - protein, 3 aa, Artificial Sequence
  Description of Artificial Sequence: Synthetic peptide
DAS

SEQ ID NO: 753 - protein, 9 aa, Artificial Sequence
  Description of Artificial Sequence: Synthetic peptide
HQYDNLPLT

SEQ ID NO: 754 - protein, 8 aa, Artificial Sequence
  Description of Artificial Sequence: Synthetic peptide
GFNFRGYA

SEQ ID NO: 755 - protein, 8 aa, Artificial Sequence
  Description of Artificial Sequence: Synthetic peptide
ISGSGGTT

SEQ ID NO: 756 - protein, 15 aa, Artificial Sequence
  Description of Artificial Sequence: Synthetic peptide
AQSYAQIGYGGHIDH

SEQ ID NO: 757 - protein, 9 aa, Artificial Sequence
  Description of Artificial Sequence: Synthetic peptide
SGIDVATYM

SEQ ID NO: 758 - protein, 7 aa, Artificial Sequence
  Description of Artificial Sequence: Synthetic peptide
YKSDSDK

SEQ ID NO: 759 - protein, 9 aa, Artificial Sequence
  Description of Artificial Sequence: Synthetic peptide
LIWHGSHYV

SEQ ID NO: 760 - protein, 8 aa, Artificial Sequence
  Description of Artificial Sequence: Synthetic peptide
GYTLTELS

SEQ ID NO: 761 - protein, 8 aa, Artificial Sequence
  Description of Artificial Sequence: Synthetic peptide
FDPEDGET

SEQ ID NO: 762 - protein, 19 aa, Artificial Sequence
  Description of Artificial Sequence: Synthetic peptide
ATGVPAAIGVYYYYYYMDV

SEQ ID NO: 763 - protein, 11 aa, Artificial Sequence
  Description of Artificial Sequence: Synthetic peptide
QSLLYRNGYNY

SEQ ID NO: 764 - protein, 3 aa, Artificial Sequence
  Description of Artificial Sequence: Synthetic peptide
WGS

SEQ ID NO: 765 - protein, 9 aa, Artificial Sequence
  Description of Artificial Sequence: Synthetic peptide
MQAVQNPPT

SEQ ID NO: 766 - protein, 8 aa, Artificial Sequence
  Description of Artificial Sequence: Synthetic peptide
GGTFSSSA

SEQ ID NO: 767 - protein, 8 aa, Artificial Sequence
  Description of Artificial Sequence: Synthetic peptide
IIPIYGIT

SEQ ID NO: 768 - protein, 22 aa, Artificial Sequence
  Description of Artificial Sequence: Synthetic peptide
ARDDTARRVRGVPYYYYYAMDV

SEQ ID NO: 769 - protein, 6 aa, Artificial Sequence
  Description of Artificial Sequence: Synthetic peptide
QNIDSS

SEQ ID NO: 770 - protein, 3 aa, Artificial Sequence
  Description of Artificial Sequence: Synthetic peptide
YAS

SEQ ID NO: 771 - protein, 9 aa, Artificial Sequence
  Description of Artificial Sequence: Synthetic peptide
HQSSSLPLT

SEQ ID NO: 772 - protein, 8 aa, Artificial Sequence
  Description of Artificial Sequence: Synthetic peptide
GGTFSSSA

SEQ ID NO: 773 - protein, 8 aa, Artificial Sequence
  Description of Artificial Sequence: Synthetic peptide
IIPIYGIT

SEQ ID NO: 774 - protein, 22 aa, Artificial Sequence
  Description of Artificial Sequence: Synthetic peptide
ARDDTARRVRGVPYYYYYAMDV

SEQ ID NO: 775 - protein, 7 aa, Artificial Sequence
  Description of Artificial Sequence: Synthetic peptide
QSVYNNY

SEQ ID NO: 776 - protein, 3 aa, Artificial Sequence
  Description of Artificial Sequence: Synthetic peptide
DAS

SEQ ID NO: 777 - protein, 10 aa, Artificial Sequence
  Description of Artificial Sequence: Synthetic peptide
QQYNSWPPYT

SEQ ID NO: 778 - protein, 8 aa, Artificial Sequence
  Description of Artificial Sequence: Synthetic peptide
GGTFSSYA

SEQ ID NO: 779 - protein, 8 aa, Artificial Sequence
  Description of Artificial Sequence: Synthetic peptide
IIPIFGTA

SEQ ID NO: 780 - protein, 20 aa, Artificial Sequence
  Description of Artificial Sequence: Synthetic peptide
ARDAYYYDSSGYYNPDAFDI

SEQ ID NO: 781 - protein, 11 aa, Artificial Sequence
  Description of Artificial Sequence: Synthetic peptide
QSLLYSNGYNY

SEQ ID NO: 782 - protein, 3 aa, Artificial Sequence
  Description of Artificial Sequence: Synthetic peptide
LGS

SEQ ID NO: 783 - protein, 9 aa, Artificial Sequence
  Description of Artificial Sequence: Synthetic peptide
MQARQTPYT

SEQ ID NO: 784 - protein, 8 aa, Artificial Sequence
  Description of Artificial Sequence: Synthetic peptide
GGTFSSSA

SEQ ID NO: 785 - protein, 8 aa, Artificial Sequence
  Description of Artificial Sequence: Synthetic peptide
IIPIYGIT

SEQ ID NO: 786 - protein, 22 aa, Artificial Sequence
  Description of Artificial Sequence: Synthetic peptide
ARDDTARRVRGVPYYYYYAMDV

SEQ ID NO: 787 - protein, 6 aa, Artificial Sequence
  Description of Artificial Sequence: Synthetic peptide
ESVTTF

SEQ ID NO: 788 - protein, 3 aa, Artificial Sequence
  Description of Artificial Sequence: Synthetic peptide
DAS

SEQ ID NO: 789 - protein, 9 aa, Artificial Sequence
  Description of Artificial Sequence: Synthetic peptide
HQHTNWPLT

SEQ ID NO: 790 - protein, 8 aa, Artificial Sequence
  Description of Artificial Sequence: Synthetic peptide
GYTLTELS

SEQ ID NO: 791 - protein, 8 aa, Artificial Sequence
  Description of Artificial Sequence: Synthetic peptide
FDPEDGET

SEQ ID NO: 792 - protein, 22 aa, Artificial Sequence
  Description of Artificial Sequence: Synthetic peptide
ATEVGYCSGGSCYISYYYGMDV

SEQ ID NO: 793 - protein, 11 aa, Artificial Sequence
  Description of Artificial Sequence: Synthetic peptide
QSLLYRNGHNF

SEQ ID NO: 794 - protein, 3 aa, Artificial Sequence
  Description of Artificial Sequence: Synthetic peptide
LGS

SEQ ID NO: 795 - protein, 9 aa, Artificial Sequence
  Description of Artificial Sequence: Synthetic peptide
MQALQTPPT

SEQ ID NO: 796 - protein, 8 aa, Artificial Sequence
  Description of Artificial Sequence: Synthetic peptide
GGTFSSSA

SEQ ID NO: 797 - protein, 8 aa, Artificial Sequence
  Description of Artificial Sequence: Synthetic peptide
IIPIYGIT

SEQ ID NO: 798 - protein, 22 aa, Artificial Sequence
  Description of Artificial Sequence: Synthetic peptide
ARDDTARRVRGVPYYYYYAMDV

SEQ ID NO: 799 - protein, 6 aa, Artificial Sequence
  Description of Artificial Sequence: Synthetic peptide
QTMNNY

SEQ ID NO: 800 - protein, 3 aa, Artificial Sequence
  Description of Artificial Sequence: Synthetic peptide
DAS

SEQ ID NO: 801 - protein, 10 aa, Artificial Sequence
  Description of Artificial Sequence: Synthetic peptide
QQYGDWLPIT

SEQ ID NO: 802 - protein, 8 aa, Artificial Sequence
  Description of Artificial Sequence: Synthetic peptide
GYTLTELS

SEQ ID NO: 803 - protein, 8 aa, Artificial Sequence
  Description of Artificial Sequence: Synthetic peptide
FDPEDGET

SEQ ID NO: 804 - protein, 17 aa, Artificial Sequence
  Description of Artificial Sequence: Synthetic peptide
ATAFPEATISYYYYMDV

SEQ ID NO: 805 - protein, 11 aa, Artificial Sequence
  Description of Artificial Sequence: Synthetic peptide
QSLLYRNGYNY

SEQ ID NO: 806 - protein, 3 aa, Artificial Sequence
  Description of Artificial Sequence: Synthetic peptide
WGS

SEQ ID NO: 807 - protein, 9 aa, Artificial Sequence
  Description of Artificial Sequence: Synthetic peptide
MQAVQNPPT

SEQ ID NO: 808 - protein, 8 aa, Artificial Sequence
  Description of Artificial Sequence: Synthetic peptide
GGTFSSSA

SEQ ID NO: 809 - protein, 8 aa, Artificial Sequence
  Description of Artificial Sequence: Synthetic peptide
IIPIYGIT

SEQ ID NO: 810 - protein, 22 aa, Artificial Sequence
  Description of Artificial Sequence: Synthetic peptide
ARDDTARRVRGVPYYYYYAMDV

SEQ ID NO: 811 - protein, 12 aa, Artificial Sequence
  Description of Artificial Sequence: Synthetic peptide
RSLLDSDDGNTH

SEQ ID NO: 812 - protein, 3 aa, Artificial Sequence
  Description of Artificial Sequence: Synthetic peptide
SLS

SEQ ID NO: 813 - protein, 9 aa, Artificial Sequence
  Description of Artificial Sequence: Synthetic peptide
MQRKEFPLT

SEQ ID NO: 814 - protein, 8 aa, Artificial Sequence
  Description of Artificial Sequence: Synthetic peptide
GGTFSSYA

SEQ ID NO: 815 - protein, 8 aa, Artificial Sequence
  Description of Artificial Sequence: Synthetic peptide
IIPIFGTA

SEQ ID NO: 816 - protein, 21 aa, Artificial Sequence
  Description of Artificial Sequence: Synthetic peptide
ARGPWYYDSSGYSSYAYYMDV

SEQ ID NO: 817 - protein, 11 aa, Artificial Sequence
  Description of Artificial Sequence: Synthetic peptide
QSLLHSDGYNY

SEQ ID NO: 818 - protein, 3 aa, Artificial Sequence
  Description of Artificial Sequence: Synthetic peptide
LGS

SEQ ID NO: 819 - protein, 10 aa, Artificial Sequence
  Description of Artificial Sequence: Synthetic peptide
MQALHTPGVT

SEQ ID NO: 820 - protein, 121 aa, Artificial Sequence
  Description of Artificial Sequence: Synthetic polypeptide
DVQLVESGGDLVQPGGSRKLSCTASGFTFSNFGMHWVRQAPEKGLEWVAYISSGSSTIYYADTVKGRFTISRDNPENTLFLQMTSLRSEDTAMYYCTRLDYYTNSYSMDHWGQGTSVTVSS

SEQ ID NO: 821 - protein, 8 aa, Artificial Sequence
  Description of Artificial Sequence: Synthetic peptide
GFTFSNFG

SEQ ID NO: 822 - protein, 8 aa, Artificial Sequence
  Description of Artificial Sequence: Synthetic peptide
ISSGSSTI

SEQ ID NO: 823 - protein, 14 aa, Artificial Sequence
  Description of Artificial Sequence: Synthetic peptide
TRLDYYTNSYSMDH

SEQ ID NO: 824 - protein, 106 aa, Artificial Sequence
  Description of Artificial Sequence: Synthetic polypeptide
QIVLTQSPALMSASPGEKVTLTCSASSSLPYIYWYQQKPGSSPKPWIYLTSNLASGVPARFSGSRSGTSYSLTISSVEAEDAATYYCQQWSSNPFTFGSGTKLEIK

SEQ ID NO: 825 - protein, 5 aa, Artificial Sequence
  Description of Artificial Sequence: Synthetic peptide
SSLPY

SEQ ID NO: 826 - protein, 3 aa, Artificial Sequence
  Description of Artificial Sequence: Synthetic peptide
LTS

SEQ ID NO: 827 - protein, 9 aa, Artificial Sequence
  Description of Artificial Sequence: Synthetic peptide
QQWSSNPFT

SEQ ID NO: 828 - protein, 117 aa, Artificial Sequence
  Description of Artificial Sequence: Synthetic polypeptide
QVQLQQSGAELAKPGASVKMSCKASGYTFTSNWMHWVKQRPGQGLEWIGYINPSNGYTECNQKFRDKATLSADKSSSTAYMQLNSLTSADSAVYYCALMISAWLPYWGQGTLVTVSA

SEQ ID NO: 829 - protein, 8 aa, Artificial Sequence
  Description of Artificial Sequence: Synthetic peptide
GYTFTSNW

SEQ ID NO: 830 - protein, 8 aa, Artificial Sequence
  Description of Artificial Sequence: Synthetic peptide
INPSNGYT

SEQ ID NO: 831 - protein, 10 aa, Artificial Sequence
  Description of Artificial Sequence: Synthetic peptide
ALMISAWLPY

SEQ ID NO: 832 - protein, 111 aa, Artificial Sequence
  Description of Artificial Sequence: Synthetic polypeptide
DIVLTQSPASLAISLGQRATISCRASQSVSASSYSYVHWYQQKPGQPPKLLIKYASSLESGVPARFSGSGSGTDFTLNIHPVEEEDTATYYCLHTWEIPYTFGGGTKLEIK

SEQ ID NO: 833 - protein, 10 aa, Artificial Sequence
  Description of Artificial Sequence: Synthetic peptide
QSVSASSYSY

SEQ ID NO: 834 - protein, 3 aa, Artificial Sequence
  Description of Artificial Sequence: Synthetic peptide
YAS

SEQ ID NO: 835 - protein, 9 aa, Artificial Sequence
  Description of Artificial Sequence: Synthetic peptide
LHTWEIPYT

SEQ ID NO: 836 - protein, 116 aa, Artificial Sequence
  Description of Artificial Sequence: Synthetic polypeptide
QVQLQQSGAELTRPGASVNLSCKASGYTFTSYWMQWVKQRPGQGLEWIGAIYPGDGDTRFNQKFKGKATLTADESSSTAYMQLSSLASEDSAVYYCATYYRYDDYWGQGTTLTVSS

SEQ ID NO: 837 - protein, 8 aa, Artificial Sequence
  Description of Artificial Sequence: Synthetic peptide
GYTFTSYW

SEQ ID NO: 838 - protein, 8 aa, Artificial Sequence
  Description of Artificial Sequence: Synthetic peptide
IYPGDGDT

SEQ ID NO: 839 - protein, 9 aa, Artificial Sequence
  Description of Artificial Sequence: Synthetic peptide
ATYYRYDDY

SEQ ID NO: 840 - protein, 106 aa, Artificial Sequence
  Description of Artificial Sequence: Synthetic polypeptide
QIVLTQSPAIMSASPGEKVTMTCSASSSVSYMHWYQQKSGTSPKRWIYDTSKLASGVPTRFSGSGSGTSYSLTISSMEAEDAATYYCQQWSSNPYTFGGGTKLEIK

SEQ ID NO: 841 - protein, 5 aa, Artificial Sequence
  Description of Artificial Sequence: Synthetic peptide
SSVSY

SEQ ID NO: 842 - protein, 3 aa, Artificial Sequence
  Description of Artificial Sequence: Synthetic peptide
DTS

SEQ ID NO: 843 - protein, 9 aa, Artificial Sequence
  Description of Artificial Sequence: Synthetic peptide
QQWSSNPYT

SEQ ID NO: 844 - protein, 122 aa, Artificial Sequence
  Description of Artificial Sequence: Synthetic polypeptide
EVQLQQSGPDLVKPGASMKISCKASGYTFIDYNIHWVKQSQGKSLDWIGYIYPYNGGTGYNQKFKNKATLTVDSSSSTAYMEVRSLTFEDSAVYFCAREADYYGNRGQFDYWGQGTLVTVSA

SEQ ID NO: 845 - protein, 8 aa, Artificial Sequence
  Description of Artificial Sequence: Synthetic peptide
GYTFIDYN

SEQ ID NO: 846 - protein, 8 aa, Artificial Sequence
  Description of Artificial Sequence: Synthetic peptide
IYPYNGGT

SEQ ID NO: 847 - protein, 15 aa, Artificial Sequence
  Description of Artificial Sequence: Synthetic peptide
AREADYYGNRGQFDY

SEQ ID NO: 848 - protein, 107 aa, Artificial Sequence
  Description of Artificial Sequence: Synthetic polypeptide
DIQMTQSPASLSVSVGETVTITCRASENIFSNLAWYQQKQGKSPQLLVYGEANLADGVPSRFSGSGSGTQYSLKINSLQSEDFGNYYCQHFWGTPYTFGGGTTLEIK

SEQ ID NO: 849 - protein, 6 aa, Artificial Sequence
  Description of Artificial Sequence: Synthetic peptide
ENIFSN

SEQ ID NO: 850 - protein, 3 aa, Artificial Sequence
  Description of Artificial Sequence: Synthetic peptide
GEA

SEQ ID NO: 851 - protein, 9 aa, Artificial Sequence
  Description of Artificial Sequence: Synthetic peptide
QHFWGTPYT

SEQ ID NO: 852 - protein, 120 aa, Artificial Sequence
  Description of Artificial Sequence: Synthetic polypeptide
QVTLKESGPGILQPSQTLSLTCSFSGFSLNTSGTGVGWIRQPSGKGLEWLTHIWWNDNKFYNTFLKSRLTISKETSNNQVFLKIASVDTADAATYYCARMAYGNLWFVNWGQGTLVAVST

SEQ ID NO: 853 - protein, 10 aa, Artificial Sequence
  Description of Artificial Sequence: Synthetic peptide
GFSLNTSGTG

SEQ ID NO: 854 - protein, 7 aa, Artificial Sequence
  Description of Artificial Sequence: Synthetic peptide
IWWNDNK

SEQ ID NO: 855 - protein, 12 aa, Artificial Sequence
  Description of Artificial Sequence: Synthetic peptide
ARMAYGNLWFVN

SEQ ID NO: 856 - protein, 111 aa, Artificial Sequence
  Description of Artificial Sequence: Synthetic polypeptide
DIVLTQSPASLAVSLGQRASISCRASRSVTISGYSYMYWYQQKPGQPPRLLFYLASNLASGVPARFSGSGSGTDFTLNIHPVEEEDAAIYYCQHSRELPYTFGGGTKLEIK

SEQ ID NO: 857 - protein, 10 aa, Artificial Sequence
  Description of Artificial Sequence: Synthetic peptide
RSVTISGYSY

SEQ ID NO: 858 - protein, 3 aa, Artificial Sequence
  Description of Artificial Sequence: Synthetic peptide
LAS

SEQ ID NO: 859 - protein, 9 aa, Artificial Sequence
  Description of Artificial Sequence: Synthetic peptide
QHSRELPYT

SEQ ID NO: 860 - protein, 123 aa, Artificial Sequence
  Description of Artificial Sequence: Synthetic polypeptide
QIQLVQSGPELKKPRETVKISCKASGYTFTDYSMHWVKQAPGKGLKWMGWINTETGEPTYADDFKGRFAFSLEASASSAYLQINILKDEDTATYFCARSRGGYYEDYYALDYWGQGTSVTVSS

SEQ ID NO: 861 - protein, 8 aa, Artificial Sequence
  Description of Artificial Sequence: Synthetic peptide
GYTFTDYS

SEQ ID NO: 862 - protein, 8 aa, Artificial Sequence
  Description of Artificial Sequence: Synthetic peptide
INTETGEP

SEQ ID NO: 863 - protein, 16 aa, Artificial Sequence
  Description of Artificial Sequence: Synthetic peptide
ARSRGGYYEDYYALDY

SEQ ID NO: 864 - protein, 107 aa, Artificial Sequence
  Description of Artificial Sequence: Synthetic polypeptide
DIQMTQSPASLSASVGESVTITCRASGNIHYYLAWYQQKQGKSPQLLVYNAKNLADGVPSRFSGSGSGTQFSLKINSLQPEDFGSYYCQHFWISPPTFGGGTKLEIK

SEQ ID NO: 865 - protein, 6 aa, Artificial Sequence
  Description of Artificial Sequence: Synthetic peptide
GNIHYY

SEQ ID NO: 866 - protein, 3 aa, Artificial Sequence
  Description of Artificial Sequence: Synthetic peptide
NAK

SEQ ID NO: 867 - protein, 9 aa, Artificial Sequence
  Description of Artificial Sequence: Synthetic peptide
QHFWISPPT

SEQ ID NO: 868 - protein, 118 aa, Artificial Sequence
  Description of Artificial Sequence: Synthetic polypeptide
EVQLRQSGADLVKPGASVKLSCTASGFNIKDTYIDWVKQRPEQGLDWIGRIDPANGNTKYDPKFQGKATIITDTSSNTAYLQLSNLTSEDTAVYYCARYGSYPYFDYWGRGTTLAVSS

SEQ ID NO: 869 - protein, 8 aa, Artificial Sequence
  Description of Artificial Sequence: Synthetic peptide
GFNIKDTY

SEQ ID NO: 870 - protein, 8 aa, Artificial Sequence
  Description of Artificial Sequence: Synthetic peptide
IDPANGNT

SEQ ID NO: 871 - protein, 11 aa, Artificial Sequence
  Description of Artificial Sequence: Synthetic peptide
ARYGSYPYFDY

SEQ ID NO: 872 - protein, 107 aa, Artificial Sequence
  Description of Artificial Sequence: Synthetic polypeptide
SIVMTQTPKFLLISAGDRVTITCKASQSVRNDVAWYQQKPGQSPKLLMYYASNRYTGVPDRFTGSGYGTDFTFTISTVQAEDLAVYFCQQDYSSPPTFGGGTKLEIK

SEQ ID NO: 873 - protein, 6 aa, Artificial Sequence
  Description of Artificial Sequence: Synthetic peptide
QSVRND

SEQ ID NO: 874 - protein, 3 aa, Artificial Sequence
  Description of Artificial Sequence: Synthetic peptide
YAS

SEQ ID NO: 875 - protein, 9 aa, Artificial Sequence
  Description of Artificial Sequence: Synthetic peptide
QQDYSSPPT

SEQ ID NO: 876 - protein, 118 aa, Artificial Sequence
  Description of Artificial Sequence: Synthetic polypeptide
QVQLQQSGPELVRPGVSVKISCKVSGYTFTDYVMHWVKQSHAKSLEWIGIISPYSGNTNYNQNFKGKATMTVDKSSSTAYMALARLTSEDSAIYYCAREGDLPMFAYWGQGTLVTVSA

SEQ ID NO: 877 - protein, 8 aa, Artificial Sequence
  Description of Artificial Sequence: Synthetic peptide
GYTFTDYV

SEQ ID NO: 878 - protein, 8 aa, Artificial Sequence
  Description of Artificial Sequence: Synthetic peptide
ISPYSGNT

SEQ ID NO: 879 - protein, 11 aa, Artificial Sequence
  Description of Artificial Sequence: Synthetic peptide
AREGDLPMFAY

SEQ ID NO: 880 - protein, 106 aa, Artificial Sequence
  Description of Artificial Sequence: Synthetic polypeptide
QIVLTQSPTIMSASPGEKVTMTCSASSSVSYIYWYQQNPGSSPRLLIYDTSILASGVPFRFSGSGSGTSYSLTISRMEAEDAATYYCQQWTSYPLTFGSGTKLELK

SEQ ID NO: 881 - protein, 5 aa, Artificial Sequence
  Description of Artificial Sequence: Synthetic peptide
SSVSY

SEQ ID NO: 882 - protein, 3 aa, Artificial Sequence
  Description of Artificial Sequence: Synthetic peptide
DTS

SEQ ID NO: 883 - protein, 9 aa, Artificial Sequence
  Description of Artificial Sequence: Synthetic peptide
QQWTSYPLT

SEQ ID NO: 884 - protein, 120 aa, Artificial Sequence
  Description of Artificial Sequence: Synthetic polypeptide
EVQLQQSGPELVKPGASVKISCKASGYTFTDYNINWVKQSHGKSLEWIGYIYPYIGGSGYNQKFKSKATLSADNPSSTAYMELRSLTSEDSAVYYCAREDKTARNAMDYWGQGTPVTVSS

SEQ ID NO: 885 - protein, 8 aa, Artificial Sequence
  Description of Artificial Sequence: Synthetic peptide
GYTFTDYN

SEQ ID NO: 886 - protein, 8 aa, Artificial Sequence
  Description of Artificial Sequence: Synthetic peptide
IYPYIGGS

SEQ ID NO: 887 - protein, 13 aa, Artificial Sequence
  Description of Artificial Sequence: Synthetic peptide
AREDKTARNAMDY

SEQ ID NO: 888 - protein, 107 aa, Artificial Sequence
  Description of Artificial Sequence: Synthetic polypeptide
DIQMTQSPASLSVSVGETVTIICRVSENIYSNLAWYQQKQGKSPQLLVYEATNLAEGVPSRFSGSGSGTQYSLKINSLQSEDFGSYYCQHFWGTPYTFGGGTKLEIK

SEQ ID NO: 889 - protein, 6 aa, Artificial Sequence
  Description of Artificial Sequence: Synthetic peptide
ENIYSN

SEQ ID NO: 890 - protein, 3 aa, Artificial Sequence
  Description of Artificial Sequence: Synthetic peptide
EAT

SEQ ID NO: 891 - protein, 9 aa, Artificial Sequence
  Description of Artificial Sequence: Synthetic peptide
QHFWGTPYT

SEQ ID NO: 892 - protein, 120 aa, Artificial Sequence
  Description of Artificial Sequence: Synthetic polypeptide
DVQLQESGPGLVKPSQSLSLTCTVTGYSITSDYAWNWIRQFPGNKLEWMGYISYSGSTSYNPSLKSRISITRDTSKNQFFLQLNSVTTEDTATYYCARHYRYPPYAMDYWGQGTSVTVSS

SEQ ID NO: 893 - protein, 9 aa, Artificial Sequence
  Description of Artificial Sequence: Synthetic peptide
GYSITSDYA

SEQ ID NO: 894 - protein, 7 aa, Artificial Sequence
  Description of Artificial Sequence: Synthetic peptide
ISYSGST

SEQ ID NO: 895 - protein, 13 aa, Artificial Sequence
  Description of Artificial Sequence: Synthetic peptide
ARHYRYPPYAMDY

SEQ ID NO: 896 - protein, 113 aa, Artificial Sequence
  Description of Artificial Sequence: Synthetic polypeptide
DIVMTQSPSSLAMSVGQKVTMSCKSSQSLLNSSNQKNYLAWYQQKPGQSPKLLVYFASTRESGVPDRFIGSGSGTDFTLTITSVQAEDLADYFCQQHYSTPFTFGSGTKLEIK

SEQ ID NO: 897 - protein, 12 aa, Artificial Sequence
  Description of Artificial Sequence: Synthetic peptide
QSLLNSSNQKNY

SEQ ID NO: 898 - protein, 3 aa, Artificial Sequence
  Description of Artificial Sequence: Synthetic peptide
FAS

SEQ ID NO: 899 - protein, 9 aa, Artificial Sequence
  Description of Artificial Sequence: Synthetic peptide
QQHYSTPFT

SEQ ID NO: 900 - protein, 118 aa, Artificial Sequence
  Description of Artificial Sequence: Synthetic polypeptide
QVQLKQSGPGLVQPSQSLSITCTVSGFSLTSFGVHWVRQSPGKGLEWLGVIWSGGTTVYDAAFISRLSISKDNSKSQVFFKMNSLQTNDTAIYYCARKRGNFYVMDYWGQGTSVTVSS

SEQ ID NO: 901 - protein, 8 aa, Artificial Sequence
  Description of Artificial Sequence: Synthetic peptide
GFSLTSFG

SEQ ID NO: 902 - protein, 7 aa, Artificial Sequence
  Description of Artificial Sequence: Synthetic peptide
IWSGGTT

SEQ ID NO: 903 - protein, 12 aa, Artificial Sequence
  Description of Artificial Sequence: Synthetic peptide
ARKRGNFYVMDY

SEQ ID NO: 904 - protein, 113 aa, Artificial Sequence; identical to SEQ ID NO: 896
  Description of Artificial Sequence: Synthetic polypeptide

SEQ ID NO: 905 - protein, 12 aa, Artificial Sequence
  Description of Artificial Sequence: Synthetic peptide
QSLLNSSNQKNY

SEQ ID NO: 906 - protein, 3 aa, Artificial Sequence
  Description of Artificial Sequence: Synthetic peptide
FAS

SEQ ID NO: 907 - protein, 9 aa, Artificial Sequence
  Description of Artificial Sequence: Synthetic peptide
QQHYSTPFT

SEQ ID NO: 908 - protein, 118 aa, Artificial Sequence
  Description of Artificial Sequence: Synthetic polypeptide
QVQLQQPGSELVRPGTSVKLSCKASGYTFTSYWVHWVRQRHGQGLEWIGNVYPGSGSTNYDEKFKSKGTLTVDTSSSTAYMHLSSLTSEDSAVYYCTRGVLRFPLDYWGQGTTLTVSS

SEQ ID NO: 909 - protein, 8 aa, Artificial Sequence
  Description of Artificial Sequence: Synthetic peptide
GYTFTSYW

SEQ ID NO: 910 - protein, 8 aa, Artificial Sequence
  Description of Artificial Sequence: Synthetic peptide
VYPGSGST

SEQ ID NO: 911 - protein, 11 aa, Artificial Sequence
  Description of Artificial Sequence: Synthetic peptide
TRGVLRFPLDY

SEQ ID NO: 912 - protein, 112 aa, Artificial Sequence
  Description of Artificial Sequence: Synthetic polypeptide
DIVMTQAAPSVPVTPGESVSISCRSSKSLLHSNGNTYLYWFLQRPGQSPHLLIYRMSNLASGVPDRFSGSGSGTAFTLRISRVEAEDVGVYYCMQHLEYPLTFGAGTKLELK

SEQ ID NO: 913 - protein, 11 aa, Artificial Sequence
  Description of Artificial Sequence: Synthetic peptide
KSLLHSNGNTY

SEQ ID NO: 914 - protein, 3 aa, Artificial Sequence
  Description of Artificial Sequence: Synthetic peptide
RMS

SEQ ID NO: 915 - protein, 9 aa, Artificial Sequence
  Description of Artificial Sequence: Synthetic peptide
MQHLEYPLT

SEQ ID NO: 916 - protein, 118 aa, Artificial Sequence
  Description of Artificial Sequence: Synthetic polypeptide
QVQLQQSGPEVVRPGVSVKISCKGSGYKFPDYVMHWVKQSHAKSLEWIGIISIYSGNTNYNQKFKGKATMTVDKSSSTAYMELARLTSEDSAIYYCAREGDLPMFAYWGQGTLVTVSA

SEQ ID NO: 917 - protein, 8 aa, Artificial Sequence
  Description of Artificial Sequence: Synthetic peptide
GYKFPDYV

SEQ ID NO: 918 - protein, 8 aa, Artificial Sequence
  Description of Artificial Sequence: Synthetic peptide
ISIYSGNT

SEQ ID NO: 919 - protein, 11 aa, Artificial Sequence
  Description of Artificial Sequence: Synthetic peptide
AREGDLPMFAY

SEQ ID NO: 920 - protein, 106 aa, Artificial Sequence
  Description of Artificial Sequence: Synthetic polypeptide
QIVLTQSPAIMSASPGEKVTMTCNASSSVSYMYWYQQKPISSPRLLIYDTSNLASGVPVRFSGSGSGTSYSLTIGRMEAEDAATYYCQQWSSYPLTFGAGTKVEVK

SEQ ID NO: 921 - protein, 5 aa, Artificial Sequence
  Description of Artificial Sequence: Synthetic peptide
SSVSY

SEQ ID NO: 922 - protein, 3 aa, Artificial Sequence
  Description of Artificial Sequence: Synthetic peptide
DTS

SEQ ID NO: 923 - protein, 9 aa, Artificial Sequence
  Description of Artificial Sequence: Synthetic peptide
QQWSSYPLT

SEQ ID NO: 924 - protein, 122 aa, Artificial Sequence
  Description of Artificial Sequence: Synthetic polypeptide
QVQLKESGPGLVAPSQSLSITCTVSGFSLTAYNINWVRQPPGKGLEWLGMIWGDGNTDYNSPLKSRLTISKDNSKSQVFLKMDSLQTDDTARYYCARDLKVRRDSPYTMDYWGQGTSVTVSS

SEQ ID NO: 925 - protein, 8 aa, Artificial Sequence
  Description of Artificial Sequence: Synthetic peptide
GFSLTAYN

SEQ ID NO: 926 - protein, 7 aa, Artificial Sequence
  Description of Artificial Sequence: Synthetic peptide
IWGDGNT

SEQ ID NO: 927 - protein, 16 aa, Artificial Sequence
  Description of Artificial Sequence: Synthetic peptide
ARDLKVRRDSPYTMDY

SEQ ID NO: 928 - protein, 112 aa, Artificial Sequence
  Description of Artificial Sequence: Synthetic polypeptide
NIMMTQSPSSLAVSAGEKVTMSCKSSQSVLYSSNQKNYLAWYQQKPGQSPKLLIYWASNRESGVPDRFTGSGSGTDFTLTISSVQAEDLAVYYCHQYLSSYTFGGGTKLEIK

SEQ ID NO: 929 - protein, 12 aa, Artificial Sequence
  Description of Artificial Sequence: Synthetic peptide
QSVLYSSNQKNY

SEQ ID NO: 930 - protein, 3 aa, Artificial Sequence
  Description of Artificial Sequence: Synthetic peptide
WAS

SEQ ID NO: 931 - protein, 8 aa, Artificial Sequence
  Description of Artificial Sequence: Synthetic peptide
HQYLSSYT

SEQ ID NO: 932 - protein, 124 aa, Artificial Sequence
  Description of Artificial Sequence: Synthetic polypeptide
DVQLQESGPGLVKPSQSLSLTCTVTGYSLTSDYAWNWIRQFPGNKLEWMGYITYSGGTTYNPSLKSRISITRDTSKNQFFLQLTSVTTEDTATYYCARRGSGTTVVGDWYFDVWGAGTTVTVSS

SEQ ID NO: 933 - protein, 9 aa, Artificial Sequence
  Description of Artificial Sequence: Synthetic peptide
GYSLTSDYA

SEQ ID NO: 934 - protein, 7 aa, Artificial Sequence
  Description of Artificial Sequence: Synthetic peptide
ITYSGGT

SEQ ID NO: 935 - protein, 17 aa, Artificial Sequence
  Description of Artificial Sequence: Synthetic peptide
ARRGSGTTVVGDWYFDV

SEQ ID NO: 936 - protein, 113 aa, Artificial Sequence
  Description of Artificial Sequence: Synthetic polypeptide
DIVMSQSPSSLAVSVGEKVTMSCKSSQSLLYSFNQKYYLAWYQQKPGQSPKLLIYWASTRESGVPDRFTGSGSGTDFTPTISSVTAEDLAVYYCQQFYTYPYTFGGGTKLEMK

SEQ ID NO: 937 - protein, 12 aa, Artificial Sequence
  Description of Artificial Sequence: Synthetic peptide
QSLLYSFNQKYY

SEQ ID NO: 938 - protein, 3 aa, Artificial Sequence
  Description of Artificial Sequence: Synthetic peptide
WAS

SEQ ID NO: 939 - protein, 9 aa, Artificial Sequence
  Description of Artificial Sequence: Synthetic peptide
QQFYTYPYT

SEQ ID NO: 940 - protein, 122 aa, Artificial Sequence
  Description of Artificial Sequence: Synthetic polypeptide
EVQVQQSGPELVKPGASVKISCKASGYTFTKSNMHWVKQSHGKSLEWIGYIYPYNGGTGYNQNFKSKATLTVDISSSTAYMELRSLTLEDSAVYLCAREADYYGNRGQFDYWGQGTLVTVSA

SEQ ID NO: 941 - protein, 8 aa, Artificial Sequence
  Description of Artificial Sequence: Synthetic peptide
GYTFTKSN

SEQ ID NO: 942 - protein, 8 aa, Artificial Sequence
  Description of Artificial Sequence: Synthetic peptide
IYPYNGGT

SEQ ID NO: 943 - protein, 15 aa, Artificial Sequence
  Description of Artificial Sequence: Synthetic peptide
AREADYYGNRGQFDY

SEQ ID NO: 944 - protein, 107 aa, Artificial Sequence
  Description of Artificial Sequence: Synthetic polypeptide
DIQMTQSPASLSVSVGETVTITCRASDNIFSNLAWYHQKQGKSPHLLVYGATNLADGVPSRFSGSGSGTQYSLKINSLQSEDFGDYYCQHFWGTPYTFGGGTKLEIK

SEQ ID NO: 945 - protein, 6 aa, Artificial Sequence
  Description of Artificial Sequence: Synthetic peptide
DNIFSN

SEQ ID NO: 946 - protein, 3 aa, Artificial Sequence
  Description of Artificial Sequence: Synthetic peptide
GAT

SEQ ID NO: 947 - protein, 9 aa, Artificial Sequence
  Description of Artificial Sequence: Synthetic peptide
QHFWGTPYT

SEQ ID NO: 948 - protein, 119 aa, Artificial Sequence
  Description of Artificial Sequence: Synthetic polypeptide
QVQLQQSGAELMRPGTSVKVSCKASGYAFTNHLIEWIKQRPGQGLEWIGVINPGSDSTDYNEKFKDKATLTADKSSSTAYMQLSSLTSDDSAVYFCARSLYYNSWFVYWGQGTLVTVSA

SEQ ID NO: 949 - protein, 8 aa, Artificial Sequence
  Description of Artificial Sequence: Synthetic peptide
GYAFTNHL

SEQ ID NO: 950 - protein, 8 aa, Artificial Sequence
  Description of Artificial Sequence: Synthetic peptide
INPGSDST

SEQ ID NO: 951 - protein, 12 aa, Artificial Sequence
  Description of Artificial Sequence: Synthetic peptide
ARSLYYNSWFVY

SEQ ID NO: 952 - protein, 107 aa, Artificial Sequence
  Description of Artificial Sequence: Synthetic polypeptide
DIQMTQSPASLSASVGETVTITCRASENIYSYLAWYQQKRGKSPQLLVYNAKTLVEGVPSRFSGSGSGTQFSLKINSLQPEDFGSYYCQHHYGTPYTFGGGTKLEIK

SEQ ID NO: 953 - protein, 6 aa, Artificial Sequence
  Description of Artificial Sequence: Synthetic peptide
ENIYSY

SEQ ID NO: 954 - protein, 3 aa, Artificial Sequence
  Description of Artificial Sequence: Synthetic peptide
NAK

SEQ ID NO: 955 - protein, 9 aa, Artificial Sequence
  Description of Artificial Sequence: Synthetic peptide
QHHYGTPYT

SEQ ID NO: 956 - protein, 118 aa, Artificial Sequence
  Description of Artificial Sequence: Synthetic polypeptide
EVQLQQSGAELVKPGASVRLSCTASGFSIRDTYIHWVKQRPEQGLDWIGKIDPANGKSEYDPKFQGRATMTTDTSSNTAYLQLSSLTSEDTAVYYCTRYGYYPYFDVWGAGTTVTVFS

SEQ ID NO: 957 - protein, 8 aa, Artificial Sequence
  Description of Artificial Sequence: Synthetic peptide
GFSIRDTY

SEQ ID NO: 958 - protein, 8 aa, Artificial Sequence
  Description of Artificial Sequence: Synthetic peptide
IDPANGKS

SEQ ID NO: 959 - protein, 11 aa, Artificial Sequence
  Description of Artificial Sequence: Synthetic peptide
TRYGYYPYFDV

SEQ ID NO: 960 - protein, 107 aa, Artificial Sequence
  Description of Artificial Sequence: Synthetic polypeptide
SIVMTQTPKFLLVSAGDRVAITCKASQSVRHDVVWYQQKPGQSPKLLIYYASSRYTGVPDRFTGSGYGTDFTFTISTVQAEDLALYFCLQDFSSPWTFGGGTKLEIK

SEQ ID NO: 961 - protein, 6 aa, Artificial Sequence
  Description of Artificial Sequence: Synthetic peptide
QSVRHD

SEQ ID NO: 962 - protein, 3 aa, Artificial Sequence
  Description of Artificial Sequence: Synthetic peptide
YAS

SEQ ID NO: 963 - protein, 9 aa, Artificial Sequence
  Description of Artificial Sequence: Synthetic peptide
LQDFSSPWT

SEQ ID NO: 964 - protein, 120 aa, Artificial Sequence
  Description of Artificial Sequence: Synthetic polypeptide
EVQLQQSGPELVKPGASVKISCKTSGYTFTKNTMHWVRQSHGKSLEWIGGINPNSGGASFNQKFMGKATLTVDKSSSTAYMELRSLTSEDSAVYYCARDGYDGDWFFDVWGAGTTVTVSS

SEQ ID NO: 965 - protein, 8 aa, Artificial Sequence
  Description of Artificial Sequence: Synthetic peptide
GYTFTKNT

SEQ ID NO: 966 - protein, 8 aa, Artificial Sequence
  Description of Artificial Sequence: Synthetic peptide
INPNSGGA

SEQ ID NO: 967 - protein, 13 aa, Artificial Sequence
  Description of Artificial Sequence: Synthetic peptide
ARDGYDGDWFFDV

SEQ ID NO: 968 - protein, 107 aa, Artificial Sequence
  Description of Artificial Sequence: Synthetic polypeptide
DIQMNQSPFSLSASLGDTVTITCHASQNIYVWLSWYQQKPGNIPKLLIYKASDLHTGVPSRFSGSGSGTDFTLNISSLQPEDIATYYCQQGQSYPRTFGGGTKLEIK

SEQ ID NO: 969 - protein, 6 aa, Artificial Sequence
  Description of Artificial Sequence: Synthetic peptide
QNIYVW

SEQ ID NO: 970 - protein, 3 aa, Artificial Sequence
  Description of Artificial Sequence: Synthetic peptide
KAS

SEQ ID NO: 971 - protein, 9 aa, Artificial Sequence
  Description of Artificial Sequence: Synthetic peptide
QQGQSYPRT

SEQ ID NO: 972 - protein, 114 aa, Artificial Sequence
  Description of Artificial Sequence: Synthetic polypeptide
QVQLKESGPGLVAPSQSLSITCTVSGFSLIGHGVNWIRQPPGKGLEWLGVIWGDGNTDYNSALKSRLSISKDNSKSQVFLKMNSLQTDDTARYFCAVNSAMDYWGQGTAVTVSS

SEQ ID NO: 973 - protein, 8 aa, Artificial Sequence
  Description of Artificial Sequence: Synthetic peptide
GFSLIGHG

SEQ ID NO: 974 - protein, 7 aa, Artificial Sequence
  Description of Artificial Sequence: Synthetic peptide
IWGDGNT

SEQ ID NO: 975 - protein, 8 aa, Artificial Sequence
  Description of Artificial Sequence: Synthetic peptide
AVNSAMDY

SEQ ID NO: 976 - protein, 107 aa, Artificial Sequence
  Description of Artificial Sequence: Synthetic polypeptide
NIVMTQSPKSMSMSVGERVTLNCTASENVASFVSWYQQKPEQSPKLLIYGTSNRYTGVPDRFTGSGSATDFTLTISSVQAEDLGDYHCGQSYNYPFTFGSGTKLEIE

SEQ ID NO: 977 - protein, 6 aa, Artificial Sequence
  Description of Artificial Sequence: Synthetic peptide
ENVASF

SEQ ID NO: 978 - protein, 3 aa, Artificial Sequence
  Description of Artificial Sequence: Synthetic peptide
GTS

SEQ ID NO: 979 - protein, 9 aa, Artificial Sequence
  Description of Artificial Sequence: Synthetic peptide
GQSYNYPFT

SEQ ID NO: 980 - protein, 119 aa, Artificial Sequence
  Description of Artificial Sequence: Synthetic polypeptide
QVQLQQSGAELVRPGASVKVSCKTSGYAFTNYLIEWVKQRPGQGLEWIGVINPGSGGIYYNDKFKVKTTLTADKSSSTAYMQLSSLTSDDSAVYFCARSETHDTWFAYWGQGTLVTVSA

SEQ ID NO: 981 - protein, 8 aa, Artificial Sequence
  Description of Artificial Sequence: Synthetic peptide
GYAFTNYL

SEQ ID NO: 982 - protein, 8 aa, Artificial Sequence
  Description of Artificial Sequence: Synthetic peptide
INPGSGGI

SEQ ID NO: 983 - protein, 12 aa, Artificial Sequence
  Description of Artificial Sequence: Synthetic peptide
ARSETHDTWFAY

SEQ ID NO: 984 - protein, 108 aa, Artificial Sequence
  Description of Artificial Sequence: Synthetic polypeptide
DIVMTQSQKFISTSVGDRVSITCKASQSVRIAVAWFQQKPGQSPKALIYLASTRHTGVPDRFTGSGSGTDFTLTISNVQSEDLADYFCLQHWNYPYTFGGGTKLEIKR

SEQ ID NO: 985 - protein, 6 aa, Artificial Sequence
  Description of Artificial Sequence: Synthetic peptide
QSVRIA

SEQ ID NO: 986 - protein, 3 aa, Artificial Sequence
  Description of Artificial Sequence: Synthetic peptide
LAS

SEQ ID NO: 987 - protein, 9 aa, Artificial Sequence
  Description of Artificial Sequence: Synthetic peptide
LQHWNYPYT

SEQ ID NO: 988 - protein, 120 aa, Artificial Sequence
  Description of Artificial Sequence: Synthetic polypeptide
QVQLQQSGAELVRPGTSVKMSCKAAGYTFTNYWIGWVKQRPGHGLEWIGDIYPGGGYTNYNEKFKGKATLTADTSSSTAYMQLSSLTSEDSAIYYCASPYYGSSYGFAFWGQGTLVTVSA

SEQ ID NO: 989 - protein, 8 aa, Artificial Sequence
  Description of Artificial Sequence: Synthetic peptide
GYTFTNYW

SEQ ID NO: 990 - protein, 8 aa, Artificial Sequence
  Description of Artificial Sequence: Synthetic peptide
IYPGGGYT

SEQ ID NO: 991 - protein, 13 aa, Artificial Sequence
  Description of Artificial Sequence: Synthetic peptide
ASPYYGSSYGFAF

SEQ ID NO: 992 - protein, 108 aa, Artificial Sequence; identical to SEQ ID NO: 984
  Description of Artificial Sequence: Synthetic polypeptide

SEQ ID NO: 993 - protein, 6 aa, Artificial Sequence
  Description of Artificial Sequence: Synthetic peptide
QSVRIA

SEQ ID NO: 994 - protein, 3 aa, Artificial Sequence
  Description of Artificial Sequence: Synthetic peptide
LAS

SEQ ID NO: 995 - protein, 9 aa, Artificial Sequence
  Description of Artificial Sequence: Synthetic peptide
LQHWNYPYT

SEQ ID NO: 996 - protein, 117 aa, Artificial Sequence
  Description of Artificial Sequence: Synthetic polypeptide
QVQLKESGPGLVAPSQSLSITCTVSGFSLSGYGIKWVRQPPGKGLEWLGTIWGDGSTDYNSALKSRLSISKDNSKSQVFLKMTSLQTDDTARYYCASDSLGITFGYWGQGTLVTVSA

SEQ ID NO: 997 - protein, 8 aa, Artificial Sequence
  Description of Artificial Sequence: Synthetic peptide
GFSLSGYG

SEQ ID NO: 998 - protein, 7 aa, Artificial Sequence
  Description of Artificial Sequence: Synthetic peptide
IWGDGST

SEQ ID NO: 999 - protein, 11 aa, Artificial Sequence
  Description of Artificial Sequence: Synthetic peptide
ASDSLGITFGY

SEQ ID NO: 1000 - protein, 107 aa, Artificial Sequence
  Description of Artificial Sequence: Synthetic polypeptide
DIQMTQTTSSLSASLGDRVTISCRASQDISNYLNWYQQKPDGTVKLLIYYTSRLHSGVPSRFSGSGSGTDYSLTISNLEQEDIATYFCQQGNTLPLTFGAGTKLELK

SEQ ID NO: 1001 - protein, 6 aa, Artificial Sequence
  Description of Artificial Sequence: Synthetic peptide
QDISNY

SEQ ID NO: 1002 - protein, 3 aa, Artificial Sequence
  Description of Artificial Sequence: Synthetic peptide
YTS

SEQ ID NO: 1003 - protein, 9 aa, Artificial Sequence
  Description of Artificial Sequence: Synthetic peptide
QQGNTLPLT

SEQ ID NO: 1004 - protein, 120 aa, Artificial Sequence
  Description of Artificial Sequence: Synthetic polypeptide
QVQLKESGPGLVAPSQSLSITCTVSGFSLTSYAITWVRQPPGKGLEWLGVIWPGGGTNYNSALKSRLSISKDNSKSHLFLKMNSLQTDDTARYYCVRSYDGYLDWYFDVWGTGTTVTVSS

SEQ ID NO: 1005 - protein, 8 aa, Artificial Sequence
  Description of Artificial Sequence: Synthetic peptide
GFSLTSYA

SEQ ID NO: 1006 - protein, 7 aa, Artificial Sequence
  Description of Artificial Sequence: Synthetic peptide
IWPGGGT

SEQ ID NO: 1007 - protein, 14 aa, Artificial Sequence
  Description of Artificial Sequence: Synthetic peptide
VRSYDGYLDWYFDV

SEQ ID NO: 1008 - protein, 107 aa, Artificial Sequence
  Description of Artificial Sequence: Synthetic polypeptide
NIVMTQSPKSMSMSVGERVTLSCKASENVGTYVSWYQQKPDQSPKLLIYGASNRYTGVPDRFTGSGSATDFTLIISSVQAEDLSDYHCGQSYSYPYTFGGGTKLEII

SEQ ID NO: 1009 - protein, 6 aa, Artificial Sequence
  Description of Artificial Sequence: Synthetic peptide
ENVGTY

SEQ ID NO: 1010 - protein, 3 aa, Artificial Sequence
  Description of Artificial Sequence: Synthetic peptide
GAS

SEQ ID NO: 1011 - protein, 9 aa, Artificial Sequence
  Description of Artificial Sequence: Synthetic peptide
GQSYSYPYT

SEQ ID NO: 1012 - protein, 123 aa, Artificial Sequence
  Description of Artificial Sequence: Synthetic polypeptide
QIQLVQSGPDLKKPGETVKISCKASGYTFTTYGMSWVKQAPGRGLKWMGWINTYSGVSTFPDDFKGRFAFSLETSASTAYLQINNLKNEDSATYFCARLGMGSTTGAGYFDVWGTGTTVTVSS

SEQ ID NO: 1013 - protein, 8 aa, Artificial Sequence
  Description of Artificial Sequence: Synthetic peptide
GYTFTTYG

SEQ ID NO: 1014 - protein, 8 aa, Artificial Sequence
  Description of Artificial Sequence: Synthetic peptide
INTYSGVS

SEQ ID NO: 1015 - protein, 16 aa, Artificial Sequence
  Description of Artificial Sequence: Synthetic peptide
ARLGMGSTTGAGYFDV

SEQ ID NO: 1016 - protein, 108 aa, Artificial Sequence
  Description of Artificial Sequence: Synthetic polypeptide
DIVLTQSPAIMSASPGEKVTMTCSASSSVSSWYLHWYQQKSGASPKLWIYGTSNLASGVPARFSGSGSGTSYSLTISSVEAEDAATYYCQQYRSDPYTFGSGTKLEIK

SEQ ID NO: 1017 - protein, 7 aa, Artificial Sequence
  Description of Artificial Sequence: Synthetic peptide
SSVSSWY

SEQ ID NO: 1018 - protein, 3 aa, Artificial Sequence
  Description of Artificial Sequence: Synthetic peptide
GTS

SEQ ID NO: 1019 - protein, 9 aa, Artificial Sequence
  Description of Artificial Sequence: Synthetic peptide
QQYRSDPYT

SEQ ID NO: 1020 - protein, 123 aa, Artificial Sequence
  Description of Artificial Sequence: Synthetic polypeptide
QIQLVQSGPELKKPGETVKISCKASGYTFTTYGMSWVKQAPGKGLKWMGWINTYSGVSTYADDFEGRFAFSLETSVSTAYLQINNLKNEDTATYFCARLGRGSTTGAGYLDVWGTGTTVTVSS

SEQ ID NO: 1021 - protein, 8 aa, Artificial Sequence
  Description of Artificial Sequence: Synthetic peptide
GYTFTTYG

SEQ ID NO: 1022 - protein, 8 aa, Artificial Sequence
  Description of Artificial Sequence: Synthetic peptide
INTYSGVS

SEQ ID NO: 1023 - protein, 16 aa, Artificial Sequence
  Description of Artificial Sequence: Synthetic peptide
ARLGRGSTTGAGYLDV

SEQ ID NO: 1024 - protein, 108 aa, Artificial Sequence
  Description of Artificial Sequence: Synthetic polypeptide
DIVLTQSPAIMSASPGEKVSMTCSASSSVSSWYLHWYQQKSGASPKLWIYGTSNLASGVPARFSGSGSGTSYSLTISSVEAEDAATYYCQQYHSDPYTFGSGTKLEIK

SEQ ID NO: 1025 - protein, 7 aa, Artificial Sequence
  Description of Artificial Sequence: Synthetic peptide
SSVSSWY

SEQ ID NO: 1026 - protein, 3 aa, Artificial Sequence
  Description of Artificial Sequence: Synthetic peptide
GTS

SEQ ID NO: 1027 - protein, 9 aa, Artificial Sequence
  Description of Artificial Sequence: Synthetic peptide
QQYHSDPYT

SEQ ID NO: 1028 - protein, 123 aa, Artificial Sequence; identical to SEQ ID NO: 1012
  Description of Artificial Sequence: Synthetic polypeptide

SEQ ID NO: 1029 - protein, 8 aa, Artificial Sequence
  Description of Artificial Sequence: Synthetic peptide
GYTFTTYG

SEQ ID NO: 1030 - protein, 8 aa, Artificial Sequence
  Description of Artificial Sequence: Synthetic peptide
INTYSGVS

SEQ ID NO: 1031 - protein, 16 aa, Artificial Sequence
  Description of Artificial Sequence: Synthetic peptide
ARLGMGSTTGAGYFDV

SEQ ID NO: 1032 - protein, 106 aa, Artificial Sequence
  Description of Artificial Sequence: Synthetic polypeptide
ENVLTQSPAIMSASLGEKVTLSCRASSSVNYMYWYQQKSDASPKLWIYYTSNLAPGVPARFSGSGSGNSYSLTISSVEGEDAATYYCQQFTSSPWTFGGGTKLEIK

SEQ ID NO: 1033 - protein, 5 aa, Artificial Sequence
  Description of Artificial Sequence: Synthetic peptide
SSVNY

SEQ ID NO: 1034 - protein, 3 aa, Artificial Sequence
  Description of Artificial Sequence: Synthetic peptide
YTS

SEQ ID NO: 1035 - protein, 9 aa, Artificial Sequence
  Description of Artificial Sequence: Synthetic peptide
QQFTSSPWT

SEQ ID NO: 1036 - protein, 114 aa, Artificial Sequence
  Description of Artificial Sequence: Synthetic polypeptide
EVQLQQSGPELVKPGASVKISCKASGYTFTDYSMNWVKQSHGKSLEWIGDITPNNGSPNYNQKFKDKATLTVDKSSSTVYMELRSLTSEDSAVYYCASLFFDYWGHGTTLTVSS

SEQ ID NO: 1037 - protein, 8 aa, Artificial Sequence
  Description of Artificial Sequence: Synthetic peptide
GYTFTDYS

SEQ ID NO: 1038 - protein, 8 aa, Artificial Sequence
  Description of Artificial Sequence: Synthetic peptide
ITPNNGSP

SEQ ID NO: 1039 - protein, 7 aa, Artificial Sequence
  Description of Artificial Sequence: Synthetic peptide
ASLFFDY

SEQ ID NO: 1040 - protein, 113 aa, Artificial Sequence
  Description of Artificial Sequence: Synthetic polypeptide
DIVMTQSPSSLSVSAGEKVTMSCKSSQSLLNSGNQKNYLAWYQQKPGQPPKLLIYGASTRDSGVPDRFTGSGSGTDFTLTITSVQAEDLAVYYCQNDHTYPYTFGGGTKLEIK

SEQ ID NO: 1041 - protein, 12 aa, Artificial Sequence
  Description of Artificial Sequence: Synthetic peptide
QSLLNSGNQKNY

SEQ ID NO: 1042 - protein, 3 aa, Artificial Sequence
  Description of Artificial Sequence: Synthetic peptide
GAS

SEQ ID NO: 1043 - protein, 9 aa, Artificial Sequence
  Description of Artificial Sequence: Synthetic peptide
QNDHTYPYT

SEQ ID NO: 1044 - protein, 120 aa, Artificial Sequence
  Description of Artificial Sequence: Synthetic polypeptide
QVQLQQPGTELVKPGASVKLSCKASGFTFTTHWMHWVRQRPGQGLEWIGNIYPSNGGSNYNEKFKTKATLTVDRSSSTAYMHLSSLTSEDSAVYYCARRVNWDGYYFDYWGQGTTLTVSS

SEQ ID NO: 1045 - protein, 8 aa, Artificial Sequence
  Description of Artificial Sequence: Synthetic peptide
GFTFTTHW

SEQ ID NO: 1046 - protein, 8 aa, Artificial Sequence
  Description of Artificial Sequence: Synthetic peptide
IYPSNGGS

SEQ ID NO: 1047 - protein, 13 aa, Artificial Sequence
  Description of Artificial Sequence: Synthetic peptide
ARRVNWDGYYFDY

SEQ ID NO: 1048 - protein, 107 aa, Artificial Sequence
  Description of Artificial Sequence: Synthetic polypeptide
DIVMTQSQKFMSTSVGDRVSVTCKASQNVGTNVAWYQQKPGQSPKLLIYSASYRYSGVPDRFTGSGSGTDFTLTISNVQSEDLADYFCQQYNSYPLTFGGGTKLEIK

SEQ ID NO: 1049 - protein, 6 aa, Artificial Sequence
  Description of Artificial Sequence: Synthetic peptide
QNVGTN

SEQ ID NO: 1050 - protein, 3 aa, Artificial Sequence
  Description of Artificial Sequence: Synthetic peptide
SAS

SEQ ID NO: 1051 - protein, 9 aa, Artificial Sequence
  Description of Artificial Sequence: Synthetic peptide
QQYNSYPLT

SEQ ID NO: 1052 - protein, 118 aa, Artificial Sequence
  Description of Artificial Sequence: Synthetic polypeptide
QVQLQESGTELVKPGASVKLSCKASGYTFTSYWIHWVKQRPGQGLEWIGNINPSNGGTNYNEKFKSKAALTVDKSSSTAYMQLSSLTSEDSAVYYCARRGLPYFFDYWGQGTTLTVSS

SEQ ID NO: 1053 - protein, 8 aa, Artificial Sequence
  Description of Artificial Sequence: Synthetic peptide
GYTFTSYW

SEQ ID NO: 1054 - protein, 8 aa, Artificial Sequence
  Description of Artificial Sequence: Synthetic peptide
INPSNGGT

SEQ ID NO: 1055 - protein, 11 aa, Artificial Sequence
  Description of Artificial Sequence: Synthetic peptide
ARRGLPYFFDY

SEQ ID NO: 1056 - protein, 107 aa, Artificial Sequence
  Description of Artificial Sequence: Synthetic polypeptide
DIVMTQSQKFMSTSVGDRVSVTCKGSQNVGYNVAWYQQKPGQSPKALVYSASDRHSGVPDRFAGSGSGTDFTLTISNVQSEDLAEYFCQQYNSYPLTFGAGTKLELK

SEQ ID NO: 1057 - protein, 6 aa, Artificial Sequence
  Description of Artificial Sequence: Synthetic peptide
QNVGYN

SEQ ID NO: 1058 - protein, 3 aa, Artificial Sequence
  Description of Artificial Sequence: Synthetic peptide
SAS

SEQ ID NO: 1059 - protein, 9 aa, Artificial Sequence
  Description of Artificial Sequence: Synthetic peptide
QQYNSYPLT

SEQ ID NO: 1060 - protein, 8 aa, Artificial Sequence
  Description of Artificial Sequence: Synthetic peptide
GGTFSSYA

SEQ ID NO: 1061 - protein, 8 aa, Artificial Sequence
  Description of Artificial Sequence: Synthetic peptide
IIPIFGTA

SEQ ID NO: 1062 - protein, 13 aa, Artificial Sequence
  Description of Artificial Sequence: Synthetic peptide
AREEVSSPYGMDV

SEQ ID NO: 1063 - protein, 9 aa, Artificial Sequence
  Description of Artificial Sequence: Synthetic peptide
TGAVTSGHY

SEQ ID NO: 1064 - protein, 3 aa, Artificial Sequence
  Description of Artificial Sequence: Synthetic peptide
DTG

SEQ ID NO: 1065 - protein, 10 aa, Artificial Sequence
  Description of Artificial Sequence: Synthetic peptide
LLSYSGASWV

SEQ ID NO: 1066 - protein, 8 aa, Artificial Sequence
  Description of Artificial Sequence: Synthetic peptide
GGTFSSSA

SEQ ID NO: 1067 - protein, 8 aa, Artificial Sequence
  Description of Artificial Sequence: Synthetic peptide
IIPIYGIT

SEQ ID NO: 1068 - protein, 22 aa, Artificial Sequence
  Description of Artificial Sequence: Synthetic peptide
ARDDTARRVRGVPYYYYYAMDV

SEQ ID NO: 1069 - protein, 6 aa, Artificial Sequence
  Description of Artificial Sequence: Synthetic peptide
QGIGNY

SEQ ID NO: 1070 - protein, 3 aa, Artificial Sequence
  Description of Artificial Sequence: Synthetic peptide
SAS

SEQ ID NO: 1071 - protein, 9 aa, Artificial Sequence
  Description of Artificial Sequence: Synthetic peptide
QQLKDYPIT

SEQ ID NO: 1072 - protein, 8 aa, Artificial Sequence
  Description of Artificial Sequence: Synthetic peptide
GFSLSHFS

SEQ ID NO: 1073 - protein, 8 aa, Artificial Sequence
  Description of Artificial Sequence: Synthetic peptide
FDPEEGGT

SEQ ID NO: 1074 - protein, 14 aa, Artificial Sequence
  Description of Artificial Sequence: Synthetic peptide
ATGIWYSSGWPVDY

SEQ ID NO: 1075 - protein, 11 aa, Artificial Sequence
  Description of Artificial Sequence: Synthetic peptide
QSLLDSSGYNY

SEQ ID NO: 1076 - protein, 3 aa, Artificial Sequence
  Description of Artificial Sequence: Synthetic peptide
LGS

SEQ ID NO: 1077 - protein, 9 aa, Artificial Sequence
  Description of Artificial Sequence: Synthetic peptide
MQALQTPIT

SEQ ID NO: 1078 - protein, 8 aa, Artificial Sequence
  Description of Artificial Sequence: Synthetic peptide
GYTLTELS

SEQ ID NO: 1079 - protein, 8 aa, Artificial Sequence
  Description of Artificial Sequence: Synthetic peptide
FDPEDGET

SEQ ID NO: 1080 - protein, 18 aa, Artificial Sequence
  Description of Artificial Sequence: Synthetic peptide
ATVSRVRGVINYYYYMDV

SEQ ID NO: 1081 - protein, 11 aa, Artificial Sequence
  Description of Artificial Sequence: Synthetic peptide
QSLLYRNGNNY

SEQ ID NO: 1082 - protein, 3 aa, Artificial Sequence
  Description of Artificial Sequence: Synthetic peptide
LGS

SEQ ID NO: 1083 - protein, 9 aa, Artificial Sequence
  Description of Artificial Sequence: Synthetic peptide
MQALQTPPT

SEQ ID NO: 1084 - protein, 8 aa, Artificial Sequence
  Description of Artificial Sequence: Synthetic peptide
GGTFSSSA

SEQ ID NO: 1085 - protein, 8 aa, Artificial Sequence
  Description of Artificial Sequence: Synthetic peptide
IIPIYGIT

SEQ ID NO: 1086 - protein, 22 aa, Artificial Sequence
  Description of Artificial Sequence: Synthetic peptide
ARDDTARRVRGVPYYYYYAMDV

SEQ ID NO: 1087 - protein, 6 aa, Artificial Sequence
  Description of Artificial Sequence: Synthetic peptide
QSVDSS

SEQ ID NO: 1088 - protein, 3 aa, Artificial Sequence
  Description of Artificial Sequence: Synthetic peptide
DAS

SEQ ID NO: 1089 - protein, 9 aa, Artificial Sequence
  Description of Artificial Sequence: Synthetic peptide
QQYKDWPFT

SEQ ID NO: 1090 - protein, 8 aa, Artificial Sequence
  Description of Artificial Sequence: Synthetic peptide
GGTFGTYA

SEQ ID NO: 1091 - protein, 8 aa, Artificial Sequence
  Description of Artificial Sequence: Synthetic peptide
ITPISATI

SEQ ID NO: 1092 - protein, 13 aa, Artificial Sequence
  Description of Artificial Sequence: Synthetic peptide
ARGFEYSDGLLDD

SEQ ID NO: 1093 - protein, 12 aa, Artificial Sequence
  Description of Artificial Sequence: Synthetic peptide
QSLFYSDDGNTY

SEQ ID NO: 1094 - protein, 3 aa, Artificial Sequence
  Description of Artificial Sequence: Synthetic peptide
RLS

SEQ ID NO: 1095 - protein, 9 aa, Artificial Sequence
  Description of Artificial Sequence: Synthetic peptide
MQHMEFPLT

SEQ ID NO: 1096 - protein, 10 aa, Artificial Sequence
  Description of Artificial Sequence: Synthetic peptide
GGSISSSSYY

SEQ ID NO: 1097 - protein, 7 aa, Artificial Sequence
  Description of Artificial Sequence: Synthetic peptide
IYYSGST

SEQ ID NO: 1098 - protein, 15 aa, Artificial Sequence
  Description of Artificial Sequence: Synthetic peptide
ARGAWELRLGDWFDP

SEQ ID NO: 1099 - protein, 9 aa, Artificial Sequence
  Description of Artificial Sequence: Synthetic peptide
SSNIGAGYD

SEQ ID NO: 1100 - protein, 3 aa, Artificial Sequence
  Description of Artificial Sequence: Synthetic peptide
GNN

SEQ ID NO: 1101 - protein, 12 aa, Artificial Sequence
  Description of Artificial Sequence: Synthetic peptide
QSYDSSLSIYVV

SEQ ID NO: 1102 - protein, 9 aa, Artificial Sequence
  Description of Artificial Sequence: Synthetic peptide
SGSISSTNW

SEQ ID NO: 1103 - protein, 7 aa, Artificial Sequence
  Description of Artificial Sequence: Synthetic peptide
IYHSGST

SEQ ID NO: 1104 - protein, 10 aa, Artificial Sequence
  Description of Artificial Sequence: Synthetic peptide
ARVGPAAIYY

SEQ ID NO: 1105 - protein, 8 aa, Artificial Sequence
  Description of Artificial Sequence: Synthetic peptide
SNNVGYEG

SEQ ID NO: 1106 - protein, 3 aa, Artificial Sequence
  Description of Artificial Sequence: Synthetic peptide
RNN

SEQ ID NO: 1107 - protein, 11 aa, Artificial Sequence
  Description of Artificial Sequence: Synthetic peptide
SAWDSSLNAVV

SEQ ID NO: 1108 - protein, 8 aa, Artificial Sequence
  Description of Artificial Sequence: Synthetic peptide
GYTLTELS

SEQ ID NO: 1109 - protein, 8 aa, Artificial Sequence
  Description of Artificial Sequence: Synthetic peptide
FDPEDGET

SEQ ID NO: 1110 - protein, 21 aa, Artificial Sequence
  Description of Artificial Sequence: Synthetic peptide
ATAKPGIAVAGQNYYYYYMDV

SEQ ID NO: 1111 - protein, 11 aa, Artificial Sequence
  Description of Artificial Sequence: Synthetic peptide
QSLLYRNGNNY

SEQ ID NO: 1112 - protein, 3 aa, Artificial Sequence
  Description of Artificial Sequence: Synthetic peptide
LGS

SEQ ID NO: 1113 - protein, 9 aa, Artificial Sequence
  Description of Artificial Sequence: Synthetic peptide
MQALQTPPT

SEQ ID NO: 1114 - protein, 8 aa, Artificial Sequence
  Description of Artificial Sequence: Synthetic peptide
GFTFSSYA

SEQ ID NO: 1115 - protein, 8 aa, Artificial Sequence
  Description of Artificial Sequence: Synthetic peptide
ISYDGSNK

SEQ ID NO: 1116 - protein, 17 aa, Artificial Sequence
  Description of Artificial Sequence: Synthetic peptide
ASSPIGYSYGYWGGMDV

SEQ ID NO: 1117 - protein, 9 aa, Artificial Sequence
  Description of Artificial Sequence: Synthetic peptide
SGIDVRTNK

SEQ ID NO: 1118 - protein, 7 aa, Artificial Sequence
  Description of Artificial Sequence: Synthetic peptide
FQSDSDK

SEQ ID NO: 1119 - protein, 9 aa, Artificial Sequence
  Description of Artificial Sequence: Synthetic peptide
LIWHTSGWV

SEQ ID NO: 1120 - protein, 8 aa, Artificial Sequence
  Description of Artificial Sequence: Synthetic peptide
GYTLTELS

SEQ ID NO: 1121 - protein, 8 aa, Artificial Sequence
  Description of Artificial Sequence: Synthetic peptide
FDPEDGET

SEQ ID NO: 1122 - protein, 17 aa, Artificial Sequence
  Description of Artificial Sequence: Synthetic peptide
ATGPAAAGVGYYYYMDV

SEQ ID NO: 1123 - protein, 11 aa, Artificial Sequence
  Description of Artificial Sequence: Synthetic peptide
QSLLYRNGYNY

SEQ ID NO: 1124 - protein, 3 aa, Artificial Sequence
  Description of Artificial Sequence: Synthetic peptide
LGS

SEQ ID NO: 1125 - protein, 9 aa, Artificial Sequence
  Description of Artificial Sequence: Synthetic peptide
MQALQTPPT

SEQ ID NO: 1126 - protein, 8 aa, Artificial Sequence
  Description of Artificial Sequence: Synthetic peptide
GFTFSSYA

SEQ ID NO: 1127 - protein, 8 aa, Artificial Sequence
  Description of Artificial Sequence: Synthetic peptide
ISYDGSNK

SEQ ID NO: 1128 - protein, 20 aa, Artificial Sequence
  Description of Artificial Sequence: Synthetic peptide
ARDVMVYCSSTSCYFYGMDV

SEQ ID NO: 1129 - protein, 6 aa, Artificial Sequence
  Description of Artificial Sequence: Synthetic peptide
QDIRDY

SEQ ID NO: 1130 - protein, 3 aa, Artificial Sequence
  Description of Artificial Sequence: Synthetic peptide
DAS

SEQ ID NO: 1131 - protein, 9 aa, Artificial Sequence
  Description of Artificial Sequence: Synthetic peptide
QQFENLPIT

SEQ ID NO: 1132 - protein, 8 aa, Artificial Sequence
  Description of Artificial Sequence: Synthetic peptide
GYTLTELS

SEQ ID NO: 1133 - protein, 8 aa, Artificial Sequence
  Description of Artificial Sequence: Synthetic peptide
FDPEDGET

SEQ ID NO: 1134 - protein, 18 aa, Artificial Sequence
  Description of Artificial Sequence: Synthetic peptide
ATGGYSSGFNYYYYYMDV

SEQ ID NO: 1135 - protein, 11 aa, Artificial Sequence
  Description of Artificial Sequence: Synthetic peptide
QSLLYRNGNNY

SEQ ID NO: 1136 - protein, 3 aa, Artificial Sequence
  Description of Artificial Sequence: Synthetic peptide
LGS

SEQ ID NO: 1137 - protein, 9 aa, Artificial Sequence
  Description of Artificial Sequence: Synthetic peptide
MQALQTPPT

SEQ ID NO: 1138 - protein, 8 aa, Artificial Sequence
  Description of Artificial Sequence: Synthetic peptide
GYTLTELS

SEQ ID NO: 1139 - protein, 8 aa, Artificial Sequence
  Description of Artificial Sequence: Synthetic peptide
FDPEDGET

SEQ ID NO: 1140 - protein, 14 aa, Artificial Sequence
  Description of Artificial Sequence: Synthetic peptide
ATGVTTYYYYGMDV

SEQ ID NO: 1141 - protein, 11 aa, Artificial Sequence
  Description of Artificial Sequence: Synthetic peptide
QSLLYSNGNNF

SEQ ID NO: 1142 - protein, 3 aa, Artificial Sequence
  Description of Artificial Sequence: Synthetic peptide
LGS

SEQ ID NO: 1143 - protein, 9 aa, Artificial Sequence
  Description of Artificial Sequence: Synthetic peptide
MQALQTPPT

SEQ ID NO: 1144 - protein, 8 aa, Artificial Sequence
  Description of Artificial Sequence: Synthetic peptide
GFTFSSYG

SEQ ID NO: 1145 - protein, 8 aa, Artificial Sequence
  Description of Artificial Sequence: Synthetic peptide
IRYDGSNK

SEQ ID NO: 1146 - protein, 14 aa, Artificial Sequence
  Description of Artificial Sequence: Synthetic peptide
ARDLFDFWWDGMDV

SEQ ID NO: 1147 - protein, 7 aa, Artificial Sequence
  Description of Artificial Sequence: Synthetic peptide
QSVSSMY

SEQ ID NO: 1148 - protein, 3 aa, Artificial Sequence
  Description of Artificial Sequence: Synthetic peptide
GAS

SEQ ID NO: 1149 - protein, 10 aa, Artificial Sequence
  Description of Artificial Sequence: Synthetic peptide
QQYVSSPMYT

SEQ ID NO: 1150 - protein, 8 aa, Artificial Sequence
  Description of Artificial Sequence: Synthetic peptide
GGTFSSSA

SEQ ID NO: 1151 - protein, 8 aa, Artificial Sequence
  Description of Artificial Sequence: Synthetic peptide
IIPIYGIT

SEQ ID NO: 1152 - protein, 22 aa, Artificial Sequence
  Description of Artificial Sequence: Synthetic peptide
ARDDTARRVRGVPYYYYYAMDV

SEQ ID NO: 1153 - protein, 6 aa, Artificial Sequence
  Description of Artificial Sequence: Synthetic peptide
QSVSSY

SEQ ID NO: 1154 - protein, 3 aa, Artificial Sequence
  Description of Artificial Sequence: Synthetic peptide
DAS

SEQ ID NO: 1155 - protein, 9 aa, Artificial Sequence
  Description of Artificial Sequence: Synthetic peptide
QQYDDWPQT

SEQ ID NO: 1156 - protein, 8 aa, Artificial Sequence
  Description of Artificial Sequence: Synthetic peptide
GGTFNNYG

SEQ ID NO: 1157 - protein, 8 aa, Artificial Sequence
  Description of Artificial Sequence: Synthetic peptide
IIPLFGTT

SEQ ID NO: 1158 - protein, 15 aa, Artificial Sequence
  Description of Artificial Sequence: Synthetic peptide
ARDRMAADGMAVFDY

SEQ ID NO: 1159 - protein, 8 aa, Artificial Sequence
  Description of Artificial Sequence: Synthetic peptide
SSNIGRHF

SEQ ID NO: 1160 - protein, 3 aa, Artificial Sequence
  Description of Artificial Sequence: Synthetic peptide
KND

SEQ ID NO: 1161 - protein, 11 aa, Artificial Sequence
  Description of Artificial Sequence: Synthetic peptide
SSWDAALNGVV

SEQ ID NO: 1162 - protein, 8 aa, Artificial Sequence
  Description of Artificial Sequence: Synthetic peptide
GYTLTELS

SEQ ID NO: 1163 - protein, 8 aa, Artificial Sequence
  Description of Artificial Sequence: Synthetic peptide
FDPEDGET

SEQ ID NO: 1164 - protein, 19 aa, Artificial Sequence
  Description of Artificial Sequence: Synthetic peptide
ATEVPMVRGARRYYYYMDV

SEQ ID NO: 1165 - protein, 11 aa, Artificial Sequence
  Description of Artificial Sequence: Synthetic peptide
QTLLYINENNY

SEQ ID NO: 1166 - protein, 3 aa, Artificial Sequence
  Description of Artificial Sequence: Synthetic peptide
LGS

SEQ ID NO: 1167 - protein, 9 aa, Artificial Sequence
  Description of Artificial Sequence: Synthetic peptide
MQGLQTPPT

SEQ ID NO: 1168 - protein, 10 aa, Artificial Sequence
  Description of Artificial Sequence: Synthetic peptide
GGSISNSNYY

SEQ ID NO: 1169 - protein, 7 aa, Artificial Sequence
  Description of Artificial Sequence: Synthetic peptide
IYYSGST

SEQ ID NO: 1170 - protein, 15 aa, Artificial Sequence
  Description of Artificial Sequence: Synthetic peptide
ARGAWELSLGDWFDP

SEQ ID NO: 1171 - protein, 9 aa, Artificial Sequence
  Description of Artificial Sequence: Synthetic peptide
SSNIGAGYD

SEQ ID NO: 1172 - protein, 3 aa, Artificial Sequence
  Description of Artificial Sequence: Synthetic peptide
GNN

SEQ ID NO: 1173 - protein, 12 aa, Artificial Sequence
  Description of Artificial Sequence: Synthetic peptide
QSYDSSLSVYVV

SEQ ID NO: 1174 - protein, 8 aa, Artificial Sequence
  Description of Artificial Sequence: Synthetic peptide
GGTFSSSA

SEQ ID NO: 1175 - protein, 8 aa, Artificial Sequence
  Description of Artificial Sequence: Synthetic peptide
IIPIYGIT

SEQ ID NO: 1176 - protein, 22 aa, Artificial Sequence
  Description of Artificial Sequence: Synthetic peptide
ARDDTARRVRGVPYYYYYAMDV

SEQ ID NO: 1177 - protein, 6 aa, Artificial Sequence
  Description of Artificial Sequence: Synthetic peptide
QNVYGE

SEQ ID NO: 1178 - protein, 3 aa, Artificial Sequence
  Description of Artificial Sequence: Synthetic peptide
DTF

SEQ ID NO: 1179 - protein, 9 aa, Artificial Sequence
  Description of Artificial Sequence: Synthetic peptide
QQRRDWPIT

SEQ ID NO: 1180 - protein, 8 aa, Artificial Sequence
  Description of Artificial Sequence: Synthetic peptide
GFTFGTSS

SEQ ID NO: 1181 - protein, 8 aa, Artificial Sequence
  Description of Artificial Sequence: Synthetic peptide
ISFDGTEI

SEQ ID NO: 1182 - protein, 15 aa, Artificial Sequence
  Description of Artificial Sequence: Synthetic peptide
AKGSGNIYFYSGMDV

SEQ ID NO: 1183 - protein, 6 aa, Artificial Sequence
  Description of Artificial Sequence: Synthetic peptide
QSISGW

SEQ ID NO: 1184 - protein, 3 aa, Artificial Sequence
  Description of Artificial Sequence: Synthetic peptide
ETS

SEQ ID NO: 1185 - protein, 9 aa, Artificial Sequence
  Description of Artificial Sequence: Synthetic peptide
QQYYSYPLT

SEQ ID NO: 1186 - protein, 8 aa, Artificial Sequence
  Description of Artificial Sequence: Synthetic peptide
GYTLTELS

SEQ ID NO: 1187 - protein, 8 aa, Artificial Sequence
  Description of Artificial Sequence: Synthetic peptide
FDPEDGET

SEQ ID NO: 1188 - protein, 19 aa, Artificial Sequence
  Description of Artificial Sequence: Synthetic peptide
ATGVPAAIGVYYYYYYMDV

SEQ ID NO: 1189 - protein, 11 aa, Artificial Sequence
  Description of Artificial Sequence: Synthetic peptide
QSLLYSNGYNY

SEQ ID NO: 1190 - protein, 3 aa, Artificial Sequence
  Description of Artificial Sequence: Synthetic peptide
LGS

SEQ ID NO: 1191 - protein, 9 aa, Artificial Sequence
  Description of Artificial Sequence: Synthetic peptide
MQALQSPVT

SEQ ID NO: 1192 - protein, 8 aa, Artificial Sequence
  Description of Artificial Sequence: Synthetic peptide
GYTLTELS

SEQ ID NO: 1193 - protein, 8 aa, Artificial Sequence
  Description of Artificial Sequence: Synthetic peptide
FDPEDGET

SEQ ID NO: 1194 - protein, 20 aa, Artificial Sequence
  Description of Artificial Sequence: Synthetic peptide
ATDSRDGPAARGGYYYYMDV

SEQ ID NO: 1195 - protein, 11 aa, Artificial Sequence
  Description of Artificial Sequence: Synthetic peptide
QSLLYINGYNY

SEQ ID NO: 1196 - protein, 3 aa, Artificial Sequence
  Description of Artificial Sequence: Synthetic peptide
LGS

SEQ ID NO: 1197 - protein, 9 aa, Artificial Sequence
  Description of Artificial Sequence: Synthetic peptide
MQALQTPPT

SEQ ID NO: 1198 - protein, 8 aa, Artificial Sequence
  Description of Artificial Sequence: Synthetic peptide
GGTFSSYA

SEQ ID NO: 1199 - protein, 8 aa, Artificial Sequence
  Description of Artificial Sequence: Synthetic peptide
IIPIFGTA

SEQ ID NO: 1200 - protein, 20 aa, Artificial Sequence
  Description of Artificial Sequence: Synthetic peptide
ARDAYYYDSSGYYNPDAFDI

SEQ ID NO: 1201 - protein, 11 aa, Artificial Sequence
  Description of Artificial Sequence: Synthetic peptide
QSLLHSNGYNY

SEQ ID NO: 1202 - protein, 3 aa, Artificial Sequence
  Description of Artificial Sequence: Synthetic peptide
LGS

SEQ ID NO: 1203 - protein, 9 aa, Artificial Sequence
  Description of Artificial Sequence: Synthetic peptide
MQGLQTPRT

SEQ ID NO: 1204 - protein, 10 aa, Artificial Sequence
  Description of Artificial Sequence: Synthetic peptide
GFSLTSGGMS

SEQ ID NO: 1205 - protein, 7 aa, Artificial Sequence
  Description of Artificial Sequence: Synthetic peptide
IDWNDDK

SEQ ID NO: 1206 - protein, 12 aa, Artificial Sequence
  Description of Artificial Sequence: Synthetic peptide
ARIRGMTWGFDS

SEQ ID NO: 1207 - protein, 7 aa, Artificial Sequence
  Description of Artificial Sequence: Synthetic peptide
QSVSSSY

SEQ ID NO: 1208 - protein, 3 aa, Artificial Sequence
  Description of Artificial Sequence: Synthetic peptide
GAS

SEQ ID NO: 1209 - protein, 9 aa, Artificial Sequence
  Description of Artificial Sequence: Synthetic peptide
QQYGTTPFA

SEQ ID NO: 1210 - protein, 8 aa, Artificial Sequence
  Description of Artificial Sequence: Synthetic peptide
GYTFTAYY

SEQ ID NO: 1211 - protein, 8 aa, Artificial Sequence
  Description of Artificial Sequence: Synthetic peptide
INPNSGGT

SEQ ID NO: 1212 - protein, 21 aa, Artificial Sequence
  Description of Artificial Sequence: Synthetic peptide
ARDGAFYYGSENYYNAGWFDP

SEQ ID NO: 1213 - protein, 11 aa, Artificial Sequence
  Description of Artificial Sequence: Synthetic peptide
QSLLSGNGYNY

SEQ ID NO: 1214 - protein, 3 aa, Artificial Sequence
  Description of Artificial Sequence: Synthetic peptide
LGS

SEQ ID NO: 1215 - protein, 9 aa, Artificial Sequence
  Description of Artificial Sequence: Synthetic peptide
MQALKSPLT

SEQ ID NO: 1216 - protein, 8 aa, Artificial Sequence
  Description of Artificial Sequence: Synthetic peptide
GYTFTNYY

SEQ ID NO: 1217 - protein, 8 aa, Artificial Sequence
  Description of Artificial Sequence: Synthetic peptide
INPSGGIT

SEQ ID NO: 1218 - protein, 18 aa, Artificial Sequence
  Description of Artificial Sequence: Synthetic peptide
ARAGLGYNWNYAPSGMDV

SEQ ID NO: 1219 - protein, 9 aa, Artificial Sequence
  Description of Artificial Sequence: Synthetic peptide
SSDVGGYNY

SEQ ID NO: 1220 - protein, 3 aa, Artificial Sequence
  Description of Artificial Sequence: Synthetic peptide
EVS

SEQ ID NO: 1221 - protein, 10 aa, Artificial Sequence
  Description of Artificial Sequence: Synthetic peptide
SSYAGSNNLV

SEQ ID NO: 1222 - protein, 10 aa, Artificial Sequence
  Description of Artificial Sequence: Synthetic peptide
GGSISSSSYY

SEQ ID NO: 1223 - protein, 7 aa, Artificial Sequence
  Description of Artificial Sequence: Synthetic peptide
IYYSGST

SEQ ID NO: 1224 - protein, 15 aa, Artificial Sequence
  Description of Artificial Sequence: Synthetic peptide
ARGAWELRLGDWFDP

SEQ ID NO: 1225 - protein, 9 aa, Artificial Sequence
  Description of Artificial Sequence: Synthetic peptide
SSNIGAGYD

SEQ ID NO: 1226 - protein, 3 aa, Artificial Sequence
  Description of Artificial Sequence: Synthetic peptide
GYS

SEQ ID NO: 1227 - protein, 12 aa, Artificial Sequence
  Description of Artificial Sequence: Synthetic peptide
QSYDSSLSVYVV

SEQ ID NO: 1228 - protein, 8 aa, Artificial Sequence
  Description of Artificial Sequence: Synthetic peptide
GFTFDDYA

SEQ ID NO: 1229 - protein, 8 aa, Artificial Sequence
  Description of Artificial Sequence: Synthetic peptide
ISWNSGSI

SEQ ID NO: 1230 - protein, 15 aa, Artificial Sequence
  Description of Artificial Sequence: Synthetic peptide
AKDVNRILVAGMVDY

SEQ ID NO: 1231 - protein, 11 aa, Artificial Sequence
  Description of Artificial Sequence: Synthetic peptide
QSLLHSNGYNY

SEQ ID NO: 1232 - protein, 3 aa, Artificial Sequence
  Description of Artificial Sequence: Synthetic peptide
LGS

SEQ ID NO: 1233 - protein, 9 aa, Artificial Sequence
  Description of Artificial Sequence: Synthetic peptide
MQGLQTPIT

SEQ ID NO: 1234 - protein, 8 aa, Artificial Sequence
  Description of Artificial Sequence: Synthetic peptide
RFTFEDYA

SEQ ID NO: 1235 - protein, 8 aa, Artificial Sequence
  Description of Artificial Sequence: Synthetic peptide
ISWKSGGI

SEQ ID NO: 1236 - protein, 15 aa, Artificial Sequence
  Description of Artificial Sequence: Synthetic peptide
VKDPTLVATDRAFNI

SEQ ID NO: 1237 - protein, 11 aa, Artificial Sequence
  Description of Artificial Sequence: Synthetic peptide
QSLLHSNGYNY

SEQ ID NO: 1238 - protein, 3 aa, Artificial Sequence
  Description of Artificial Sequence: Synthetic peptide
LGS

SEQ ID NO: 1239 - protein, 9 aa, Artificial Sequence
  Description of Artificial Sequence: Synthetic peptide
MQYLQTPDT

SEQ ID NO: 1240 - protein, 8 aa, Artificial Sequence
  Description of Artificial Sequence: Synthetic peptide
GGTFSSSA

SEQ ID NO: 1241 - protein, 8 aa, Artificial Sequence
  Description of Artificial Sequence: Synthetic peptide
IIPIYGIT

SEQ ID NO: 1242 - protein, 22 aa, Artificial Sequence
  Description of Artificial Sequence: Synthetic peptide
ARDDTARRVRGVPYYYYYAMDV

SEQ ID NO: 1243 - protein, 12 aa, Artificial Sequence
  Description of Artificial Sequence: Synthetic peptide
QSLLDSDDGNIH

SEQ ID NO: 1244 - protein, 3 aa, Artificial Sequence
  Description of Artificial Sequence: Synthetic peptide
TLS

SEQ ID NO: 1245 - protein, 9 aa, Artificial Sequence
  Description of Artificial Sequence: Synthetic peptide
MQRKEFPLT

SEQ ID NO: 1246 - protein, 8 aa, Artificial Sequence
  Description of Artificial Sequence: Synthetic peptide
GFTFSSYG

SEQ ID NO: 1247 - protein, 8 aa, Artificial Sequence
  Description of Artificial Sequence: Synthetic peptide
ISYDGSNK

SEQ ID NO: 1248 - protein, 18 aa, Artificial Sequence
  Description of Artificial Sequence: Synthetic peptide
AKEDRLRFLEWLFYGMDV

SEQ ID NO: 1249 - protein, 6 aa, Artificial Sequence
  Description of Artificial Sequence: Synthetic peptide
HDIYTY

SEQ ID NO: 1250 - protein, 3 aa, Artificial Sequence
  Description of Artificial Sequence: Synthetic peptide
DAS

SEQ ID NO: 1251 - protein, 11 aa, Artificial Sequence
  Description of Artificial Sequence: Synthetic peptide
QQYDNHPPEVT

SEQ ID NO: 1252 - protein, 8 aa, Artificial Sequence
  Description of Artificial Sequence: Synthetic peptide
GGTFSSSA

SEQ ID NO: 1253 - protein, 8 aa, Artificial Sequence
  Description of Artificial Sequence: Synthetic peptide
IIPIYGIT

SEQ ID NO: 1254 - protein, 22 aa, Artificial Sequence
  Description of Artificial Sequence: Synthetic peptide
ARDDTARRVRGVPYYYYYAMDV

SEQ ID NO: 1255 - protein, 6 aa, Artificial Sequence
  Description of Artificial Sequence: Synthetic peptide
QDIDDD

SEQ ID NO: 1256 - protein, 3 aa, Artificial Sequence
  Description of Artificial Sequence: Synthetic peptide
EAS

SEQ ID NO: 1257 - protein, 9 aa, Artificial Sequence
  Description of Artificial Sequence: Synthetic peptide
LQHDNLPLT

SEQ ID NO: 1258 - protein, 8 aa, Artificial Sequence
  Description of Artificial Sequence: Synthetic peptide
GYTLTELS

SEQ ID NO: 1259 - protein, 8 aa, Artificial Sequence
  Description of Artificial Sequence: Synthetic peptide
FDPEDGET

SEQ ID NO: 1260 - protein, 19 aa, Artificial Sequence
  Description of Artificial Sequence: Synthetic peptide
ATEDPGPVAGPYYYYGMDV

SEQ ID NO: 1261 - protein, 11 aa, Artificial Sequence
  Description of Artificial Sequence: Synthetic peptide
QSLLYINGYHY

SEQ ID NO: 1262 - protein, 3 aa, Artificial Sequence
  Description of Artificial Sequence: Synthetic peptide
LGS

SEQ ID NO: 1263 - protein, 9 aa, Artificial Sequence
  Description of Artificial Sequence: Synthetic peptide
MQALQTPPT

SEQ ID NO: 1264 - protein, 8 aa, Artificial Sequence
  Description of Artificial Sequence: Synthetic peptide
GYMFTNYP

SEQ ID NO: 1265 - protein, 8 aa, Artificial Sequence
  Description of Artificial Sequence: Synthetic peptide
INAGTGNT

SEQ ID NO: 1266 - protein, 21 aa, Artificial Sequence
  Description of Artificial Sequence: Synthetic peptide
AREGMFYYGLESYYKGGWFDP

SEQ ID NO: 1267 - protein, 11 aa, Artificial Sequence
  Description of Artificial Sequence: Synthetic peptide
QSLLHRNGYNY

SEQ ID NO: 1268 - protein, 3 aa, Artificial Sequence
  Description of Artificial Sequence: Synthetic peptide
LAS

SEQ ID NO: 1269 - protein, 9 aa, Artificial Sequence
  Description of Artificial Sequence: Synthetic peptide
MQALQTPLT

SEQ ID NO: 1270 - protein, 8 aa, Artificial Sequence
  Description of Artificial Sequence: Synthetic peptide
GGTFSSSA

SEQ ID NO: 1271 - protein, 8 aa, Artificial Sequence
  Description of Artificial Sequence: Synthetic peptide
IIPIYGIT

SEQ ID NO: 1272 - protein, 22 aa, Artificial Sequence
  Description of Artificial Sequence: Synthetic peptide
ARDDTARRVRGVPYYYYYAMDV

SEQ ID NO: 1273 - protein, 12 aa, Artificial Sequence
  Description of Artificial Sequence: Synthetic peptide
QSLLDSDDGNTY

SEQ ID NO: 1274 - protein, 3 aa, Artificial Sequence
  Description of Artificial Sequence: Synthetic peptide
TLS

SEQ ID NO: 1275 - protein, 9 aa, Artificial Sequence
  Description of Artificial Sequence: Synthetic peptide
MQRLQFPLT

SEQ ID NO: 1276 - protein, 8 aa, Artificial Sequence
  Description of Artificial Sequence: Synthetic peptide
TYTFTTYY

SEQ ID NO: 1277 - protein, 8 aa, Artificial Sequence
  Description of Artificial Sequence: Synthetic peptide
IYPSGGNT

SEQ ID NO: 1278 - protein, 13 aa, Artificial Sequence
  Description of Artificial Sequence: Synthetic peptide
VRDQNYYYSAMDV

SEQ ID NO: 1279 - protein, 6 aa, Artificial Sequence
  Description of Artificial Sequence: Synthetic peptide
QDIRNY

SEQ ID NO: 1280 - protein, 3 aa, Artificial Sequence
  Description of Artificial Sequence: Synthetic peptide
DAS

SEQ ID NO: 1281 - protein, 9 aa, Artificial Sequence
  Description of Artificial Sequence: Synthetic peptide
QQFENLPIT

SEQ ID NO: 1282 - protein, 8 aa, Artificial Sequence
  Description of Artificial Sequence: Synthetic peptide
GGTFSSSA

SEQ ID NO: 1283 - protein, 8 aa, Artificial Sequence
  Description of Artificial Sequence: Synthetic peptide
IIPIYGIT

SEQ ID NO: 1284 - protein, 22 aa, Artificial Sequence
  Description of Artificial Sequence: Synthetic peptide
ARDDTARRVRGVPYYYYYAMDV

SEQ ID NO: 1285 - protein, 6 aa, Artificial Sequence
  Description of Artificial Sequence: Synthetic peptide
RDISDS

SEQ ID NO: 1286 - protein, 3 aa, Artificial Sequence
  Description of Artificial Sequence: Synthetic peptide
DAS

SEQ ID NO: 1287 - protein, 9 aa, Artificial Sequence
  Description of Artificial Sequence: Synthetic peptide
HQYDNLPLT

SEQ ID NO: 1288 - protein, 8 aa, Artificial Sequence
  Description of Artificial Sequence: Synthetic peptide
GFNFRGYA

SEQ ID NO: 1289 - protein, 8 aa, Artificial Sequence
  Description of Artificial Sequence: Synthetic peptide
ISGSGGTT

SEQ ID NO: 1290 - protein, 15 aa, Artificial Sequence
  Description of Artificial Sequence: Synthetic peptide
AQSYAQIGYGGHIDH

SEQ ID NO: 1291 - protein, 9 aa, Artificial Sequence
  Description of Artificial Sequence: Synthetic peptide
SGIDVATYM

SEQ ID NO: 1292 - protein, 7 aa, Artificial Sequence
  Description of Artificial Sequence: Synthetic peptide
YKSDSDK

SEQ ID NO: 1293 - protein, 9 aa, Artificial Sequence
  Description of Artificial Sequence: Synthetic peptide
LIWHGSHYV

SEQ ID NO: 1294 - protein, 8 aa, Artificial Sequence
  Description of Artificial Sequence: Synthetic peptide
GYTLTELS

SEQ ID NO: 1295 - protein, 8 aa, Artificial Sequence
  Description of Artificial Sequence: Synthetic peptide
FDPEDGET

SEQ ID NO: 1296 - protein, 19 aa, Artificial Sequence
  Description of Artificial Sequence: Synthetic peptide
ATGVPAAIGVYYYYYYMDV

SEQ ID NO: 1297 - protein, 11 aa, Artificial Sequence
  Description of Artificial Sequence: Synthetic peptide
QSLLYRNGYNY

SEQ ID NO: 1298 - protein, 3 aa, Artificial Sequence
  Description of Artificial Sequence: Synthetic peptide
WGS

SEQ ID NO: 1299 - protein, 9 aa, Artificial Sequence
  Description of Artificial Sequence: Synthetic peptide
MQAVQNPPT

SEQ ID NO: 1300 - protein, 8 aa, Artificial Sequence
  Description of Artificial Sequence: Synthetic peptide
GGTFSSSA

SEQ ID NO: 1301 - protein, 8 aa, Artificial Sequence
  Description of Artificial Sequence: Synthetic peptide
IIPIYGIT

SEQ ID NO: 1302 - protein, 22 aa, Artificial Sequence
  Description of Artificial Sequence: Synthetic peptide
ARDDTARRVRGVPYYYYYAMDV

SEQ ID NO: 1303 - protein, 6 aa, Artificial Sequence
  Description of Artificial Sequence: Synthetic peptide
QNIDSS

SEQ ID NO: 1304 - protein, 3 aa, Artificial Sequence
  Description of Artificial Sequence: Synthetic peptide
YAS

SEQ ID NO: 1305 - protein, 9 aa, Artificial Sequence
  Description of Artificial Sequence: Synthetic peptide
HQSSSLPLT

SEQ ID NO: 1306 - protein, 8 aa, Artificial Sequence
  Description of Artificial Sequence: Synthetic peptide
GGTFSSSA

SEQ ID NO: 1307 - protein, 8 aa, Artificial Sequence
  Description of Artificial Sequence: Synthetic peptide
IIPIYGIT

SEQ ID NO: 1308 - protein, 22 aa, Artificial Sequence
  Description of Artificial Sequence: Synthetic peptide
ARDDTARRVRGVPYYYYYAMDV

SEQ ID NO: 1309 - protein, 7 aa, Artificial Sequence
  Description of Artificial Sequence: Synthetic peptide
QSVYNNY

SEQ ID NO: 1310 - protein, 3 aa, Artificial Sequence
  Description of Artificial Sequence: Synthetic peptide
DAS

SEQ ID NO: 1311 - protein, 10 aa, Artificial Sequence
  Description of Artificial Sequence: Synthetic peptide
QQYNSWPPYT

SEQ ID NO: 1312 - protein, 8 aa, Artificial Sequence
  Description of Artificial Sequence: Synthetic peptide
GGTFSSYA

SEQ ID NO: 1313 - protein, 8 aa, Artificial Sequence
  Description of Artificial Sequence: Synthetic peptide
IIPIFGTA

SEQ ID NO: 1314 - protein, 20 aa, Artificial Sequence
  Description of Artificial Sequence: Synthetic peptide
ARDAYYYDSSGYYNPDAFDI

SEQ ID NO: 1315 - protein, 11 aa, Artificial Sequence
  Description of Artificial Sequence: Synthetic peptide
QSLLYSNGYNY

SEQ ID NO: 1316 - protein, 3 aa, Artificial Sequence
  Description of Artificial Sequence: Synthetic peptide
LGS

SEQ ID NO: 1317 - protein, 9 aa, Artificial Sequence
  Description of Artificial Sequence: Synthetic peptide
MQARQTPYT

SEQ ID NO: 1318 - protein, 8 aa, Artificial Sequence
  Description of Artificial Sequence: Synthetic peptide
GGTFSSSA

SEQ ID NO: 1319 - protein, 8 aa, Artificial Sequence
  Description of Artificial Sequence: Synthetic peptide
IIPIYGIT

SEQ ID NO: 1320 - protein, 22 aa, Artificial Sequence
  Description of Artificial Sequence: Synthetic peptide
ARDDTARRVRGVPYYYYYAMDV

SEQ ID NO: 1321 - protein, 6 aa, Artificial Sequence
  Description of Artificial Sequence: Synthetic peptide
ESVTTF

SEQ ID NO: 1322 - protein, 3 aa, Artificial Sequence
  Description of Artificial Sequence: Synthetic peptide
DAS

SEQ ID NO: 1323 - protein, 9 aa, Artificial Sequence
  Description of Artificial Sequence: Synthetic peptide
HQHTNWPLT

SEQ ID NO: 1324 - protein, 8 aa, Artificial Sequence
  Description of Artificial Sequence: Synthetic peptide
GYTLTELS

SEQ ID NO: 1325 - protein, 8 aa, Artificial Sequence
  Description of Artificial Sequence: Synthetic peptide
FDPEDGET

SEQ ID NO: 1326 - protein, 22 aa, Artificial Sequence
  Description of Artificial Sequence: Synthetic peptide
ATEVGYCSGGSCYISYYYGMDV

SEQ ID NO: 1327 - protein, 11 aa, Artificial Sequence
  Description of Artificial Sequence: Synthetic peptide
QSLLYRNGHNF

SEQ ID NO: 1328 - protein, 3 aa, Artificial Sequence
  Description of Artificial Sequence: Synthetic peptide
LGS

SEQ ID NO: 1329 - protein, 9 aa, Artificial Sequence
  Description of Artificial Sequence: Synthetic peptide
MQALQTPPT

SEQ ID NO: 1330 - protein, 8 aa, Artificial Sequence
  Description of Artificial Sequence: Synthetic peptide
GGTFSSSA

SEQ ID NO: 1331 - protein, 8 aa, Artificial Sequence
  Description of Artificial Sequence: Synthetic peptide
IIPIYGIT

SEQ ID NO: 1332 - protein, 22 aa, Artificial Sequence
  Description of Artificial Sequence: Synthetic peptide
ARDDTARRVRGVPYYYYYAMDV

SEQ ID NO: 1333 - protein, 6 aa, Artificial Sequence
  Description of Artificial Sequence: Synthetic peptide
QTMNNY

SEQ ID NO: 1334 - protein, 3 aa, Artificial Sequence
  Description of Artificial Sequence: Synthetic peptide
DAS

SEQ ID NO: 1335 - protein, 10 aa, Artificial Sequence
  Description of Artificial Sequence: Synthetic peptide
QQYGDWLPIT

SEQ ID NO: 1336 - protein, 8 aa, Artificial Sequence
  Description of Artificial Sequence: Synthetic peptide
GYTLTELS

SEQ ID NO: 1337 - protein, 8 aa, Artificial Sequence
  Description of Artificial Sequence: Synthetic peptide
FDPEDGET

SEQ ID NO: 1338 - protein, 17 aa, Artificial Sequence
  Description of Artificial Sequence: Synthetic peptide
ATAFPEATISYYYYMDV

SEQ ID NO: 1339 - protein, 11 aa, Artificial Sequence
  Description of Artificial Sequence: Synthetic peptide
QSLLYRNGYNY

SEQ ID NO: 1340 - protein, 3 aa, Artificial Sequence
  Description of Artificial Sequence: Synthetic peptide
WGS

SEQ ID NO: 1341 - protein, 9 aa, Artificial Sequence
  Description of Artificial Sequence: Synthetic peptide
MQAVQNPPT

SEQ ID NO: 1342 - protein, 8 aa, Artificial Sequence
  Description of Artificial Sequence: Synthetic peptide
GGTFSSSA

SEQ ID NO: 1343 - protein, 8 aa, Artificial Sequence
  Description of Artificial Sequence: Synthetic peptide
IIPIYGIT

SEQ ID NO: 1344 - protein, 22 aa, Artificial Sequence
  Description of Artificial Sequence: Synthetic peptide
ARDDTARRVRGVPYYYYYAMDV

SEQ ID NO: 1345 - protein, 12 aa, Artificial Sequence
  Description of Artificial Sequence: Synthetic peptide
RSLLDSDDGNTH

SEQ ID NO: 1346 - protein, 3 aa, Artificial Sequence
  Description of Artificial Sequence: Synthetic peptide
SLS

SEQ ID NO: 1347 - protein, 9 aa, Artificial Sequence
  Description of Artificial Sequence: Synthetic peptide
MQRKEFPLT

SEQ ID NO: 1348 - protein, 8 aa, Artificial Sequence
  Description of Artificial Sequence: Synthetic peptide
GGTFSSYA

SEQ ID NO: 1349 - protein, 8 aa, Artificial Sequence
  Description of Artificial Sequence: Synthetic peptide
IIPIFGTA

SEQ ID NO: 1350 - protein, 21 aa, Artificial Sequence
  Description of Artificial Sequence: Synthetic peptide
ARGPWYYDSSGYSSYAYYMDV

SEQ ID NO: 1351 - protein, 11 aa, Artificial Sequence
  Description of Artificial Sequence: Synthetic peptide
QSLLHSDGYNY

SEQ ID NO: 1352 - protein, 3 aa, Artificial Sequence
  Description of Artificial Sequence: Synthetic peptide
LGS

SEQ ID NO: 1353 - protein, 10 aa, Artificial Sequence
  Description of Artificial Sequence: Synthetic peptide
MQALHTPGVT

SEQ ID NO: 1354 - protein, 330 aa, Homo sapiens [sequence omitted]

SEQ ID NO: 1355 - protein, 326 aa, Homo sapiens
ASTKGPSVFPLAPCSRSTSESTAALGCLVKDYFPEPVTVSWNSGALTSGVHTFPAVLQSSGLYSLSSVVTVPSSNFGTQTYTCNVDHKPSNTKVDKTVERKCCVECPPCPAPPVAGPSVFLFPPKPKDTLMISRTPEVTCVVVDVSHEDPEVQFNWYVDGVEVHNAKTKPREEQFNSTFRVVSVLTVVHQDWLNGKEYKCKVSNKGLPAPIEKTISKTKGQPREPQVYTLPPSREEMTKNQVSLTCLVKGFYPSDIAVEWESNGQPENNYKTTPPMLDSDGSFFLYSKLTVDKSRWQQGNVFSCSVMHEALHNHYTQKSLSLSPGK

SEQ ID NO: 1356 - protein, 377 aa, Homo sapiens
ASTKGPSVFPLAPCSRSTSGGTAALGCLVKDYFPEPVTVSWNSGALTSGVHTFPAVLQSSGLYSLSSVVTVPSSSLGTQTYTCNVNHKPSNTKVDKRVELKTPLGDTTHTCPRCPEPKSCDTPPPCPRCPEPKSCDTPPPCPRCPEPKSCDTPPPCPRCPAPELLGGPSVFLFPPKPKDTLMISRTPEVTCVVVDVSHEDPEVQFKWYVDGVEVHNAKTKPREEQYNSTFRVVSVLTVLHQDWLNGKEYKCKVSNKALPAPIEKTISKTKGQPREPQVYTLPPSREEMTKNQVSLTCLVKGFYPSDIAVEWESSGQPENNYNTTPPMLDSDGSFFLYSKLTVDKSRWQQGNIFSCSVMHEALHNRFTQKSLSLSPGK

SEQ ID NO: 1357 - protein, 327 aa, Homo sapiens
ASTKGPSVFPLAPCSRSTSESTAALGCLVKDYFPEPVTVSWNSGALTSGVHTFPAVLQSSGLYSLSSVVTVPSSSLGTKTYTCNVDHKPSNTKVDKRVESKYGPPCPSCPAPEFLGGPSVFLFPPKPKDTLMISRTPEVTCVVVDVSQEDPEVQFNWYVDGVEVHNAKTKPREEQFNSTYRVVSVLTVLHQDWLNGKEYKCKVSNKGLPSSIEKTISKAKGQPREPQVYTLPPSQEEMTKNQVSLTCLVKGFYPSDIAVEWESNGQPENNYKTTPPVLDSDGSFFLYSRLTVDKSRWQEGNVFSCSVMHEALHNHYTQKSLSLSLGK

SEQ ID NO: 1358 - protein, 21 aa, Homo sapiens
TTLAVLHPERGIRQWAPARQA

SEQ ID NO: 1359 - protein, 34 aa, Homo sapiens
TTLAVLHPERGIRQWAPARQARWETQSSISLILE

SEQ ID NO: 1360 - protein, 17 aa, Homo sapiens
ARQARWETQSSISLILE

SEQ ID NO: 1361 - protein, 16 aa, Homo sapiens
TFCCKFASFPEGSWEA

SEQ ID NO: 1362 - protein, 24 aa, Homo sapiens
TFCCKFASFPEGSWEACGSLPPSS

SEQ ID NO: 1363 - protein, 15 aa, Homo sapiens
EATELSSFTIRCGFL

SEQ ID NO: 1364 - protein, 22 aa, Homo sapiens
EVWVQVRMEATELSSFTIRCGF

SEQ ID NO: 1365 - protein, 19 aa, Homo sapiens
FTIRCGFLGSGSISLVTVS

SEQ ID NO: 1366 - protein, 24 aa, Homo sapiens
SISLVTVSWGGPNGAGGTTLAVLH

SEQ ID NO: 1367 - protein, 26 aa, Homo sapiens
SISLILEGSGASSPCANTTFCCKFAS

SEQ ID NO: 1368 - protein, 98 aa, Artificial Sequence
  Description of Artificial Sequence: Synthetic polypeptide
QVQLVQSGAEVKKPGASVKVSCKASGYTFTSYYMHWVRQAPGQGLEWMGIINPSGGSTSYAQKFQGRVTMTRDTSTSTVYMELSSLRSEDTAVYYCAR

SEQ ID NO: 1369 - protein, 15 aa, Artificial Sequence
  Description of Artificial Sequence: Synthetic peptide
YFDYWGQGTLVTVSS

SEQ ID NO: 1370 - protein, 120 aa, Artificial Sequence
  Description of Artificial Sequence: Synthetic polypeptide
  MOD_RES (33)..(33): Asn, Gln, Ser or Ala
  MOD_RES (105)..(105): Asn, Gln, Ser or Ala
EVQLQQSGPELVKPGASVKISCKASGYTFTDYXINWVKQSHGKSLEWIGYIYPYIGGSGYNQKFKSKATLSADNPSSTAYMELRSLTSEDSAVYYCAREDKTARXAMDYWGQGTPVTVSS

SEQ ID NO: 1371 - protein, 98 aa, Artificial Sequence
  Description of Artificial Sequence: Synthetic polypeptide
  MOD_RES (33)..(33): Tyr, Gln, Ser or Ala
QVQLVQSGAEVKKPGASVKVSCKASGYTFTSYXMHWVRQAPGQGLEWMGIINPSGGSTSYAQKFQGRVTMTRDTSTSTVYMELSSLRSEDTAVYYCAR

SEQ ID NO: 1372 - protein, 120 aa, Artificial Sequence
  Description of Artificial Sequence: Synthetic polypeptide
  MOD_RES (33)..(33): Asn, Gln, Ser or Ala
  MOD_RES (105)..(105): Asn, Gln, Ser or Ala
QVQLVQSGAEVKKPGASVKVSCKASGYTFTDYXINWVRQAPGQGLEWMGYIYPYIGGSGYAQKFQGRVTMTRDTSTSTVYMELSSLRSEDTAVYYCAREDKTARXAMDYWGQGTLVTVSS

SEQ ID NO: 1373 - protein, 120 aa, Artificial Sequence
  Description of Artificial Sequence: Synthetic polypeptide
  MOD_RES (33)..(33): Asn, Gln, Ser or Ala
  MOD_RES (105)..(105): Asn, Gln, Ser or Ala
QVQLVQSGAEVKKPGASVKVSCKASGYTFTDYXINWVRQAPGQGLEWIGYIYPYIGGSGYAQKFQGRVTMTADTSTSTVYMELSSLRSEDTAVYYCAREDKTARXAMDYWGQGTLVTVSS

SEQ ID NO: 1374 - protein, 120 aa, Artificial Sequence
  Description of Artificial Sequence: Synthetic polypeptide
  MOD_RES (33)..(33): Asn, Gln, Ser or Ala
  MOD_RES (105)..(105): Asn, Gln, Ser or Ala
QVQLVQSGAEVKKPGASVKISCKASGYTFTDYXINWVRQAPGQGLEWIGYIYPYIGGSGYAQKFQGRATLTADTSTSTAYMELSSLRSEDTAVYYCAREDKTARXAMDYWGQGTLVTVSS

SEQ ID NO: 1375 - protein, 120 aa, Artificial Sequence
  Description of Artificial Sequence: Synthetic polypeptide
  MOD_RES (33)..(33): Asn, Gln, Ser or Ala
  MOD_RES (105)..(105): Asn, Gln, Ser or Ala
QVQLVQSGAEVKKPGASVKISCKASGYTFTDYXINWVRQAPGQGLEWIGYIYPYIGGSGYAQKFQGRATLTADNSTSTAYMELSSLRSEDTAVYYCAREDKTARXAMDYWGQGTLVTVSS

SEQ ID NO: 1376 - protein, 96 aa, Artificial Sequence
  Description of Artificial Sequence: Synthetic polypeptide
DIQMTQSPSSLSASVGDRVTITCRASQSISSYLNWYQQKPGKAPKLLIYAASSLQSGVPSRFSGSGSGTDFTLTISSLQPEDFATYYCQQSYSTPP

SEQ ID NO: 1377 - protein, 12 aa, Artificial Sequence
  Description of Artificial Sequence: Synthetic peptide
YTFGQGTKLEIK

SEQ ID NO: 1378 - protein, 107 aa, Artificial Sequence
  Description of Artificial Sequence: Synthetic polypeptide
  MOD_RES (28)..(28): Asn, Gln, Ser, Ala or Asp
  MOD_RES (32)..(32): Asn, Gln, Ser, Ala or Asp
  MOD_RES (53)..(53): Asn, Gln, Ser, Ala or Asp
  MOD_RES (92)..(92): Trp, Tyr, Phe or His
DIQMTQSPASLSVSVGETVTIICRVSEXIYSXLAWYQQKQGKSPQLLVYEATXLAEGVPSRFSGSGSGTQYSLKINSLQSEDFGSYYCQHFXGTPYTFGGGTKLEIK

SEQ ID NO: 1379 - protein, 96 aa, Artificial Sequence
  Description of Artificial Sequence: Synthetic polypeptide
  MOD_RES (28)..(28): Gln, Ser, Ala or Asp
  MOD_RES (32)..(32): Tyr, Gln, Ser, Ala or Asp
  MOD_RES (53)..(53): Gln, Ser, Ala or Asp
  MOD_RES (92)..(92): Tyr, Phe or His
DIQMTQSPSSLSASVGDRVTITCRASQXISSXLNWYQQKPGKAPKLLIYAASXLQSGVPSRFSGSGSGTDFTLTISSLQPEDFATYYCQQSXSTPP

SEQ ID NO: 1380 - protein, 107 aa, Artificial Sequence
  Description of Artificial Sequence: Synthetic polypeptide
  MOD_RES (28)..(28): Asn, Gln, Ser, Ala or Asp
  MOD_RES (32)..(32): Asn, Gln, Ser, Ala or Asp
  MOD_RES (53)..(53): Asn, Gln, Ser, Ala or Asp
  MOD_RES (92)..(92): Trp, Tyr, Phe or His
DIQMTQSPSSLSASVGDRVTITCRVSEXIYSXLAWYQQKPGKAPKLLIYEATXLAEGVPSRFSGSGSGTDFTLTISSLQPEDFATYYCQHFXGTPYTFGQGTKLEIK

SEQ ID NO: 1381 - protein, 107 aa, Artificial Sequence
  Description of Artificial Sequence: Synthetic polypeptide
  MOD_RES (28)..(28): Asn, Gln, Ser, Ala or Asp
  MOD_RES (32)..(32): Asn, Gln, Ser, Ala or Asp
  MOD_RES (53)..(53): Asn, Gln, Ser, Ala or Asp
  MOD_RES (92)..(92): Trp, Tyr, Phe or His
DIQMTQSPSSLSASVGDRVTITCRVSEXIYSXLAWYQQKPGKAPKLLIYEATXLAEGVPSRFSGSGSGTDYTLTISSLQPEDFATYYCQHFXGTPYTFGQGTKLEIK

SEQ ID NO: 1382 - protein, 107 aa, Artificial Sequence
  Description of Artificial Sequence: Synthetic polypeptide
  MOD_RES (28)..(28): Asn, Gln, Ser, Ala or Asp
  MOD_RES (32)..(32): Asn, Gln, Ser, Ala or Asp
  MOD_RES (53)..(53): Asn, Gln, Ser, Ala or Asp
  MOD_RES (92)..(92): Trp, Tyr, Phe or His
DIQMTQSPSSLSASVGDRVTITCRVSEXIYSXLAWYQQKPGKAPKLLVYEATXLAEGVPSRFSGSGSGTDYTLTISSLQPEDFGTYYCQHFXGTPYTFGQGTKLEIK

SEQ ID NO: 1383 - protein, 98 aa, Artificial Sequence; identical to SEQ ID NO: 1368
  Description of Artificial Sequence: Synthetic polypeptide

SEQ ID NO: 1384 - protein, 15 aa, Artificial Sequence
  Description of Artificial Sequence: Synthetic peptide
YFDYWGQGTLVTVSS

SEQ ID NO: 1385 - protein, 118 aa, Artificial Sequence
  Description of Artificial Sequence: Synthetic polypeptide
  MOD_RES (57)..(57): Asn, Gln, Ser or Ala
  MOD_RES (59)..(59): Asn, Gln, Ser or Ala
  MOD_RES (104)..(104): Met, Leu, Phe or Ala
QVQLQQSGPEVVRPGVSVKISCKGSGYKFPDYVMHWVKQSHAKSLEWIGIISIYSGXTXYNQKFKGKATMTVDKSSSTAYMELARLTSEDSAIYYCAREGDLPXFAYWGQGTLVTVSA

SEQ ID NO: 1386 - protein, 98 aa, Artificial Sequence
  Description of Artificial Sequence: Synthetic polypeptide
  MOD_RES (57)..(57): Gln, Ser or Ala
  MOD_RES (59)..(59): Gln, Ser or Ala
QVQLVQSGAEVKKPGASVKVSCKASGYTFTSYYMHWVRQAPGQGLEWMGIINPSGGXTXYAQKFQGRVTMTRDTSTSTVYMELSSLRSEDTAVYYCAR

SEQ ID NO: 1387 - protein, 118 aa, Artificial Sequence
  Description of Artificial Sequence: Synthetic polypeptide
  MOD_RES (57)..(57): Asn, Gln, Ser or Ala
  MOD_RES (59)..(59): Asn, Gln, Ser or Ala
  MOD_RES (104)..(104): Met, Leu, Phe or Ala
QVQLVQSGAEVKKPGASVKVSCKASGYKFPDYVMHWVRQAPGQGLEWMGIISIYSGXTXYAQKFQGRVTMTRDTSTSTVYMELSSLRSEDTAVYYCAREGDLPXFAYWGQGTLVTVSS

SEQ ID NO: 1388 - protein, 118 aa, Artificial Sequence
  Description of Artificial Sequence: Synthetic polypeptide
  MOD_RES (57)..(57): Asn, Gln, Ser or Ala
  MOD_RES (59)..(59): Asn, Gln, Ser or Ala
  MOD_RES (104)..(104): Met, Leu, Phe or Ala
QVQLVQSGAEVKKPGASVKVSCKASGYKFPDYVMHWVRQAPGQGLEWIGIISIYSGXTXYAQKFQGRVTMTVDTSTSTVYMELSSLRSEDTAVYYCAREGDLPXFAYWGQGTLVTVSS

SEQ ID NO: 1389 - protein, 118 aa, Artificial Sequence
  Description of Artificial Sequence: Synthetic polypeptide
  MOD_RES (57)..(57): Asn, Gln, Ser or Ala
  MOD_RES (59)..(59): Asn, Gln, Ser or Ala
  MOD_RES (104)..(104): Met, Leu, Phe or Ala
QVQLVQSGAEVKKPGASVKISCKGSGYKFPDYVMHWVRQAPGQGLEWIGIISIYSGXTXYAQKFQGRATMTVDTSTSTAYMELSSLRSEDTAVYYCAREGDLPXFAYWGQGTLVTVSS

SEQ ID NO: 1390 - protein, 118 aa, Artificial Sequence
  Description of Artificial Sequence: Synthetic polypeptide
  MOD_RES (57)..(57): Asn, Gln, Ser or Ala
  MOD_RES (59)..(59): Asn, Gln, Ser or Ala
  MOD_RES (104)..(104): Met, Leu, Phe or Ala
QVQLVQSGAEVKKPGASVKISCKGSGYKFPDYVMHWVRQAPGQGLEWIGIISIYSGXTXYAQKFQGRATMTVDKSTSTAYMELSSLRSEDTAVYYCAREGDLPXFAYWGQGTLVTVSS

SEQ ID NO: 1391 - protein, 96 aa, Artificial Sequence
  Description of Artificial Sequence: Synthetic polypeptide
EIVLTQSPATLSLSPGERATLSCRASQSVSSYLAWYQQKPGQAPRLLIYDASNRATGIPARFSGSGSGTDFTLTISSLEPEDFAVYYCQQRSNWPP

SEQ ID NO: 1392 - protein, 12 aa, Artificial Sequence
  Description of Artificial Sequence: Synthetic peptide
YTFGQGTKLEIK

SEQ ID NO: 1393 - protein, 106 aa, Artificial Sequence
  Description of Artificial Sequence: Synthetic polypeptide
  MOD_RES (24)..(24): Asn, Gln, Ser, Ala or Asp
  MOD_RES (52)..(52): Asn, Gln, Ser, Ala or Asp
  MOD_RES (90)..(90): Trp, Tyr, Phe or His
QIVLTQSPAIMSASPGEKVTMTCXASSSVSYMYWYQQKPISSPRLLIYDTSXLASGVPVRFSGSGSGTSYSLTIGRMEAEDAATYYCQQXSSYPLTFGAGTKVEVK

SEQ ID NO: 1394 - protein, 96 aa, Artificial Sequence
  Description of Artificial Sequence: Synthetic polypeptide
  MOD_RES (24)..(24): Arg, Gln, Ser, Ala or Asp
  MOD_RES (53)..(53): Asn, Gln, Ser, Ala or Asp
  MOD_RES (91)..(91): Arg, Tyr, Phe or His
EIVLTQSPATLSLSPGERATLSCXASQSVSSYLAWYQQKPGQAPRLLIYDASXRATGIPARFSGSGSGTDFTLTISSLEPEDFAVYYCQQXSNWPP

SEQ ID NO: 1395 - protein, 106 aa, Artificial Sequence
  Description of Artificial Sequence: Synthetic polypeptide
  MOD_RES (24)..(24): Asn, Gln, Ser, Ala or Asp
  MOD_RES (52)..(52): Asn, Gln, Ser, Ala or Asp
  MOD_RES (90)..(90): Trp, Tyr, Phe or His
EIVLTQSPATLSLSPGERATLSCXASSSVSYMYWYQQKPGQAPRLLIYDTSXLASGIPARFSGSGSGTDFTLTISSLEPEDFAVYYCQQXSSYPLTFGQGTKLEIK

SEQ ID NO: 1396 - protein, 106 aa, Artificial Sequence
  Description of Artificial Sequence: Synthetic polypeptide
  MOD_RES (24)..(24): Asn, Gln, Ser, Ala or Asp
  MOD_RES (52)..(52): Asn, Gln, Ser, Ala or Asp
  MOD_RES (90)..(90): Trp, Tyr, Phe or His
EIVLTQSPATLSLSPGERATLSCXASSSVSYMYWYQQKPGQAPRLLIYDTSXLASGIPARFSGSGSGTDYTLTISSLEPEDFAVYYCQQXSSYPLTFGQGTKLEIK

SEQ ID NO: 1397 - protein, 106 aa, Artificial Sequence
  Description of Artificial Sequence: Synthetic polypeptide
  MOD_RES (24)..(24): Asn, Gln, Ser, Ala or Asp
  MOD_RES (52)..(52): Asn, Gln, Ser, Ala or Asp
  MOD_RES (90)..(90): Trp, Tyr, Phe or His
EIVLTQSPATLSLSPGERVTMSCXASSSVSYMYWYQQKPGQAPRLLIYDTSXLASGVPARFSGSGSGTDYTLTISSMEPEDFAVYYCQQXSSYPLTFGQGTKVEIK

SEQ ID NO: 1398 - protein, 98 aa, Artificial Sequence; identical to SEQ ID NO: 1368
  Description of Artificial Sequence: Synthetic polypeptide

SEQ ID NO: 1399 - protein, 15 aa, Artificial Sequence
  Description of Artificial Sequence: Synthetic peptide
YFDYWGQGTLVTVSS

SEQ ID NO: 1400 - protein, 119 aa, Artificial Sequence
  Description of Artificial Sequence: Synthetic polypeptide
  MOD_RES (31)..(31): Asn, Gln, Ser or Ala
  MOD_RES (52)..(52): Asn, Gln, Ser or Ala
  MOD_RES (103)..(103): Asn, Gln, Ser or Ala
  MOD_RES (105)..(105): Trp, Tyr, Phe or His
QVQLQQSGAELMRPGTSVKVSCKASGYAFTXHLIEWIKQRPGQGLEWIGVIXPGSDSTDYNEKFKDKATLTADKSSSTAYMQLSSLTSDDSAVYFCARSLYYXSXFVYWGQGTLVTVSA

SEQ ID NO: 1401 - protein, 98 aa, Artificial Sequence
  Description of Artificial Sequence: Synthetic polypeptide
  MOD_RES (31)..(31): Gln, Ser or Ala
  MOD_RES (52)..(52): Asn, Gln, Ser or Ala
QVQLVQSGAEVKKPGASVKVSCKASGYTFTXYYMHWVRQAPGQGLEWMGIIXPSGGSTSYAQKFQGRVTMTRDTSTSTVYMELSSLRSEDTAVYYCAR

SEQ ID NO: 1402 - protein, 119 aa, Artificial Sequence
  Description of Artificial Sequence: Synthetic polypeptide
  MOD_RES (31)..(31): Asn, Gln, Ser or Ala
  MOD_RES (52)..(52): Asn, Gln, Ser or Ala
  MOD_RES (103)..(103): Asn, Gln, Ser or Ala
  MOD_RES (105)..(105): Trp, Tyr, Phe or His
QVQLVQSGAEVKKPGASVKVSCKASGYAFTXHLIEWVRQAPGQGLEWMGVIXPGSDSTDYAQKFQGRVTMTRDTSTSTVYMELSSLRSEDTAVYYCARSLYYXSXFVYWGQGTLVTVSS

SEQ ID NO: 1403 - protein, 119 aa, Artificial Sequence
  Description of Artificial Sequence: Synthetic polypeptide
  MOD_RES (31)..(31): Asn, Gln, Ser or Ala
  MOD_RES (52)..(52): Asn, Gln, Ser or Ala
  MOD_RES (103)..(103): Asn, Gln, Ser or Ala
  MOD_RES (105)..(105): Trp, Tyr, Phe or His
QVQLVQSGAEVKKPGASVKVSCKASGYAFTXHLIEWVRQAPGQGLEWIGVIXPGSDSTDYAQKFQGRVTMTADTSTSTVYMELSSLRSEDTAVYYCARSLYYXSXFVYWGQGTLVTVSS

SEQ ID NO: 1404 - protein, 119 aa, Artificial Sequence
  Description of Artificial Sequence: Synthetic polypeptide
  MOD_RES (31)..(31): Asn, Gln, Ser or Ala
  MOD_RES (52)..(52): Asn, Gln, Ser or Ala
  MOD_RES (103)..(103): Asn, Gln, Ser or Ala
  MOD_RES (105)..(105): Trp, Tyr, Phe or His
QVQLVQSGAEVKKPGASVKVSCKASGYAFTXHLIEWIRQAPGQGLEWIGVIXPGSDSTDYAQKFQGRATLTADTSTSTAYMELSSLRSEDTAVYYCARSLYYXSXFVYWGQGTLVTVSS

SEQ ID NO: 1405 - protein, 119 aa, Artificial Sequence
  Description of Artificial Sequence: Synthetic polypeptide
  MOD_RES (31)..(31): Asn, Gln, Ser or Ala
  MOD_RES (52)..(52): Asn, Gln, Ser or Ala
  MOD_RES (103)..(103): Asn, Gln, Ser or Ala
  MOD_RES (105)..(105): Trp, Tyr, Phe or His
QVQLVQSGAEVKKPGASVKVSCKASGYAFTXHLIEWIRQAPGQGLEWIGVIXPGSDSTDYAQKFQGRATLTADKSTSTAYMELSSLRSEDTAVYYCARSLYYXSXFVYWGQGTLVTVSS

SEQ ID NO: 1406 - protein, 96 aa, Artificial Sequence; identical to SEQ ID NO: 1376
  Description of Artificial Sequence: Synthetic polypeptide

SEQ ID NO: 1407 - protein, 12 aa, Artificial Sequence
  Description of Artificial Sequence: Synthetic peptide
YTFGQGTKLEIK

SEQ ID NO: 1408 - protein, 107 aa, Artificial Sequence
  Description of Artificial Sequence: Synthetic polypeptide
  MOD_RES (28)..(28): Asn, Gln, Ser, Ala or Asp
  MOD_RES (50)..(50): Asn, Gln, Ser, Ala or Asp
DIQMTQSPASLSASVGETVTITCRASEXIYSYLAWYQQKRGKSPQLLVYXAKTLVEGVPSRFSGSGSGTQFSLKINSLQPEDFGSYYCQHHYGTPYTFGGGTKLEIK

SEQ ID NO: 1409 - protein, 96 aa, Artificial Sequence
  Description of Artificial Sequence: Synthetic polypeptide
  MOD_RES (28)..(28): Gln, Ser, Ala or Asp
  MOD_RES (50)..(50): Gln, Ser, Ala or Asp
DIQMTQSPSSLSASVGDRVTITCRASQXISSYLNWYQQKPGKAPKLLIYXASSLQSGVPSRFSGSGSGTDFTLTISSLQPEDFATYYCQQSYSTPP

SEQ ID NO: 1410 - protein, 107 aa, Artificial Sequence
  Description of Artificial Sequence: Synthetic polypeptide
  MOD_RES (28)..(28): Asn, Gln, Ser, Ala or Asp
  MOD_RES (50)..(50): Asn, Gln, Ser, Ala or Asp
DIQMTQSPSSLSASVGDRVTITCRASEXIYSYLAWYQQKPGKAPKLLIYXAKTLVEGVPSRFSGSGSGTDFTLTISSLQPEDFATYYCQHHYGTPYTFGQGTKLEIK

SEQ ID NO: 1411 - protein, 107 aa, Artificial Sequence
  Description of Artificial Sequence: Synthetic polypeptide
  MOD_RES (28)..(28): Asn, Gln, Ser, Ala or Asp
  MOD_RES (50)..(50): Asn, Gln, Ser, Ala or Asp
DIQMTQSPSSLSASVGDRVTITCRASEXIYSYLAWYQQKPGKAPKLLVYXAKTLVEGVPSRFSGSGSGTDFTLTISSLQPEDFGTYYCQHHYGTPYTFGQGTKLEIK

SEQ ID NO: 1412 - protein, 98 aa, Artificial Sequence; identical to SEQ ID NO: 1368
  Description of Artificial Sequence: Synthetic polypeptide

SEQ ID NO: 1413 - protein, 15 aa, Artificial Sequence
  Description of Artificial Sequence: Synthetic peptide
YFDYWGQGTLVTVSS

SEQ ID NO: 1414 - protein, 119 aa, Artificial Sequence
  Description of Artificial Sequence: Synthetic polypeptide
  MOD_RES (31)..(31): Asn, Gln, Ser or Ala
  MOD_RES (52)..(52): Asn, Gln, Ser or Ala
  MOD_RES (105)..(105): Trp, Tyr, Phe or His
QVQLQQSGAELVRPGASVKVSCKTSGYAFTXYLIEWVKQRPGQGLEWIGVIXPGSGGIYYNDKFKVKTTLTADKSSSTAYMQLSSLTSDDSAVYFCARSETHDTXFAYWGQGTLVTVSA

SEQ ID NO: 1415 - protein, 98 aa, Artificial Sequence; identical to SEQ ID NO: 1401
  Description of Artificial Sequence: Synthetic polypeptide
  MOD_RES (31)..(31): Gln, Ser or Ala
  MOD_RES (52)..(52): Asn, Gln, Ser or Ala

SEQ ID NO: 1416 - protein, 119 aa, Artificial Sequence
  Description of Artificial Sequence: Synthetic polypeptide
  MOD_RES (31)..(31): Asn, Gln, Ser or Ala
  MOD_RES (52)..(52): Asn, Gln, Ser or Ala
  MOD_RES (105)..(105): Trp, Tyr, Phe or His
QVQLVQSGAEVKKPGASVKVSCKASGYAFTXYLIEWVRQAPGQGLEWMGVIXPGSGGIYYAQKFQGRVTMTRDTSTSTVYMELSSLRSEDTAVYYCARSETHDTXFAYWGQGTLVTVSS

SEQ ID NO: 1417 - protein, 119 aa, Artificial Sequence
  Description of Artificial Sequence: Synthetic polypeptide
  MOD_RES (31)..(31): Asn, Gln, Ser or Ala
  MOD_RES (52)..(52): Asn, Gln, Ser or Ala
  MOD_RES (105)..(105): Trp, Tyr, Phe or His
QVQLVQSGAEVKKPGASVKVSCKASGYAFTXYLIEWVRQAPGQGLEWIGVIXPGSGGIYYAQKFQGRVTMTADTSTSTVYMELSSLRSEDTAVYYCARSETHDTXFAYWGQGTLVTVSS

SEQ ID NO: 1418 - protein, 119 aa, Artificial Sequence
  Description of Artificial Sequence: Synthetic polypeptide
  MOD_RES (31)..(31): Asn, Gln, Ser or Ala
  MOD_RES (52)..(52): Asn, Gln, Ser or Ala
  MOD_RES (105)..(105): Trp, Tyr, Phe or His
QVQLVQSGAEVKKPGASVKVSCKTSGYAFTXYLIEWVRQAPGQGLEWIGVIXPGSGGIYYAQKFQGRVTLTADTSTSTAYMELSSLRSEDTAVYYCARSETHDTXFAYWGQGTLVTVSS

SEQ ID NO: 1419 - protein, 119 aa, Artificial Sequence
  Description of Artificial Sequence: Synthetic polypeptide
  MOD_RES (31)..(31): Asn, Gln, Ser or Ala
  MOD_RES (52)..(52): Asn, Gln, Ser or Ala
  MOD_RES (105)..(105): Trp, Tyr, Phe or His
QVQLVQSGAEVKKPGASVKVSCKTSGYAFTXYLIEWVRQAPGQGLEWIGVIXPGSGGIYYAQKFQGRVTLTADKSTSTAYMELSSLRSEDTAVYYCARSETHDTXFAYWGQGTLVTVSS

SEQ ID NO: 1420 - protein, 96 aa, Artificial Sequence; identical to SEQ ID NO: 1376
  Description of Artificial Sequence: Synthetic polypeptide

SEQ ID NO: 1421 - protein, 12 aa, Artificial Sequence
  Description of Artificial Sequence: Synthetic peptide
YTFGQGTKLEIK

SEQ ID NO: 1422 - protein, 96 aa, Artificial Sequence
  Description of Artificial Sequence: Synthetic polypeptide
DIQMTQSPSSLSASVGDRVTITCRASQGIRNDLGWYQQKPGKAPKRLIYAASSLQSGVPSRFSGSGSGTEFTLTISNLQPEDFATYYCLQHNSYPP

SEQ ID NO: 1423 - protein, 107 aa, Artificial Sequence
  Description of Artificial Sequence: Synthetic polypeptide
  MOD_RES (92)..(92): Trp, Tyr, Phe or His
  MOD_RES (93)..(93): Asn, Gln, Ser, Ala or Asp
DIVMTQSQKFISTSVGDRVSITCKASQSVRIAVAWFQQKPGQSPKALIYLASTRHTGVPDRFTGSGSGTDFTLTISNVQSEDLADYFCLQHXXYPYTFGGGTKLEIK

SEQ ID NO: 1424 - protein, 96 aa, Artificial Sequence
  Description of Artificial Sequence: Synthetic polypeptide
  MOD_RES (92)..(92): Tyr, Phe or His
  MOD_RES (93)..(93): Gln, Ser, Ala or Asp
DIQMTQSPSSLSASVGDRVTITCRASQSISSYLNWYQQKPGKAPKLLIYAASSLQSGVPSRFSGSGSGTDFTLTISSLQPEDFATYYCQQSXXTPP

SEQ ID NO: 1425 - protein, 107 aa, Artificial Sequence
  Description of Artificial Sequence: Synthetic polypeptide
  MOD_RES (92)..(92): Trp, Tyr, Phe or His
  MOD_RES (93)..(93): Asn, Gln, Ser, Ala or Asp
DIQMTQSPSSLSASVGDRVTITCKASQSVRIAVAWYQQKPGKAPKLLIYLASTRHTGVPSRFSGSGSGTDFTLTISSLQPEDFATYYCLQHXXYPYTFGQGTKLEIK

SEQ ID NO: 1426 - protein, 107 aa, Artificial Sequence
  Description of Artificial Sequence: Synthetic polypeptide
  MOD_RES (92)..(92): Trp, Tyr, Phe or His
  MOD_RES (93)..(93): Asn, Gln, Ser, Ala or Asp
DIQMTQSPSSLSASVGDRVTITCKASQSVRIAVAWFQQKPGKAPKALIYLASTRHTGVPSRFSGSGSGTDFTLTISSVQPEDFATYYCLQHXXYPYTFGQGTKLEIK

SEQ ID NO: 1427 - protein, 98 aa, Artificial Sequence; identical to SEQ ID NO: 1368
  Description of Artificial Sequence: Synthetic polypeptide

SEQ ID NO: 1428 - protein, 15 aa, Artificial Sequence
  Description of Artificial Sequence: Synthetic peptide
YFDYWGQGTLVTVSS

SEQ ID NO: 1429 - protein, 120 aa, Artificial Sequence
  Description of Artificial Sequence: Synthetic polypeptide
  MOD_RES (31)..(31): Asn, Gln, Ser or Ala
  MOD_RES (33)..(33): Trp, Tyr, Phe or His
  MOD_RES (59)..(59): Asn, Gln, Ser or Ala
QVQLQQSGAELVRPGTSVKMSCKAAGYTFTXYXIGWVKQRPGHGLEWIGDIYPGGGYTXYNEKFKGKATLTADTSSSTAYMQLSSLTSEDSAIYYCASPYYGSSYGFAFWGQGTLVTVSA

SEQ ID NO: 1430 - protein, 98 aa, Artificial Sequence
  Description of Artificial Sequence: Synthetic polypeptide
  MOD_RES (31)..(31): Gln, Ser or Ala
  MOD_RES (33)..(33): Tyr, Phe or His
  MOD_RES (59)..(59): Gln, Ser or Ala
QVQLVQSGAEVKKPGASVKVSCKASGYTFTXYXMHWVRQAPGQGLEWMGIINPSGGSTXYAQKFQGRVTMTRDTSTSTVYMELSSLRSEDTAVYYCAR

SEQ ID NO: 1431 - protein, 120 aa, Artificial Sequence
  Description of Artificial Sequence: Synthetic polypeptide
  MOD_RES (31)..(31): Asn, Gln, Ser or Ala
  MOD_RES (33)..(33): Trp, Tyr, Phe or His
  MOD_RES (59)..(59): Asn, Gln, Ser or Ala
QVQLVQSGAEVKKPGASVKVSCKASGYTFTXYXIGWVRQAPGQGLEWMGDIYPGGGYTXYAQKFQGRVTMTRDTSTSTVYMELSSLRSEDTAVYYCARPYYGSSYGFAFWGQGTLVTVSS

SEQ ID NO: 1432 - protein, 120 aa, Artificial Sequence
  Description of Artificial Sequence: Synthetic polypeptide
  MOD_RES (31)..(31): Asn, Gln, Ser or Ala
  MOD_RES (33)..(33): Trp, Tyr, Phe or His
  MOD_RES (59)..(59): Asn, Gln, Ser or Ala
QVQLVQSGAEVKKPGASVKVSCKASGYTFTXYXIGWVRQAPGQGLEWIGDIYPGGGYTXYAQKFQGRVTMTADTSTSTVYMELSSLRSEDTAVYYCASPYYGSSYGFAFWGQGTLVTVSS

SEQ ID NO: 1433 - protein, 120 aa, Artificial Sequence
  Description of Artificial Sequence: Synthetic polypeptide
  MOD_RES (31)..(31): Asn, Gln, Ser or Ala
  MOD_RES (33)..(33): Trp, Tyr, Phe or His
  MOD_RES (59)..(59): Asn, Gln, Ser or Ala
QVQLVQSGAEVKKPGASVKMSCKASGYTFTXYXIGWVRQAPGQGLEWIGDIYPGGGYTXYAQKFQGRATLTADTSTSTAYMELSSLRSEDTAVYYCASPYYGSSYGFAFWGQGTLVTVSS

SEQ ID NO: 1434 - protein, 120 aa, Artificial Sequence
  Description of Artificial Sequence: Synthetic polypeptide
QVQLVQSGAEVKKPGASVKVSCKASGYTFTDYNINWVRQAPGQGLEWMGYIYPYIGGSGYAQKFQGRVTMTRDTSTSTVYMELSSLRSEDTAVYYCAREDKTARNAMDYWGQGTLVTVSS

SEQ ID NO: 1435 - protein, 120 aa, Artificial Sequence
  Description of Artificial Sequence: Synthetic polypeptide
QVQLVQSGAEVKKPGASVKVSCKASGYTFTDYNINWVRQAPGQGLEWIGYIYPYIGGSGYAQKFQGRVTMTADTSTSTVYMELSSLRSEDTAVYYCAREDKTARNAMDYWGQGTLVTVSS

SEQ ID NO: 1436 - protein, 120 aa, Artificial Sequence
  Description of Artificial Sequence: Synthetic polypeptide
QVQLVQSGAEVKKPGASVKISCKASGYTFTDYNINWVRQAPGQGLEWIGYIYPYIGGSGYAQKFQGRATLTADTSTSTAYMELSSLRSEDTAVYYCAREDKTARNAMDYWGQGTLVTVSS

SEQ ID NO: 1437 - protein, 120 aa, Artificial Sequence
  Description of Artificial Sequence: Synthetic polypeptide
QVQLVQSGAEVKKPGASVKISCKASGYTFTDYNINWVRQAPGQGLEWIGYIYPYIGGSGYAQKFQGRATLTADNSTSTAYMELSSLRSEDTAVYYCAREDKTARNAMDYWGQGTLVTVSS

SEQ ID NO: 1438 - protein, 118 aa, Artificial Sequence
  Description of Artificial Sequence: Synthetic polypeptide
QVQLVQSGAEVKKPGASVKVSCKASGYKFPDYVMHWVRQAPGQGLEWMGIISIYSGNTNYAQKFQGRVTMTRDTSTSTVYMELSSLRSEDTAVYYCAREGDLPMFAYWGQGTLVTVSS

SEQ ID NO: 1439 - protein, 118 aa, Artificial Sequence
  Description of Artificial Sequence: Synthetic polypeptide
QVQLVQSGAEVKKPGASVKVSCKASGYKFPDYVMHWVRQAPGQGLEWIGIISIYSGNTNYAQKFQGRVTMTVDTSTSTVYMELSSLRSEDTAVYYCAREGDLPMFAYWGQGTLVTVSS

SEQ ID NO: 1440 - protein, 118 aa, Artificial Sequence
  Description of Artificial Sequence: Synthetic polypeptide
QVQLVQSGAEVKKPGASVKISCKGSGYKFPDYVMHWVRQAPGQGLEWIGIISIYSGNTNYAQKFQGRATMTVDTSTSTAYMELSSLRSEDTAVYYCAREGDLPMFAYWGQGTLVTVSS

SEQ ID NO: 1441 - protein, 118 aa, Artificial Sequence
  Description of Artificial Sequence: Synthetic polypeptide
QVQLVQSGAEVKKPGASVKISCKGSGYKFPDYVMHWVRQAPGQGLEWIGIISIYSGNTNYAQKFQGRATMTVDKSTSTAYMELSSLRSEDTAVYYCAREGDLPMFAYWGQGTLVTVSS

SEQ ID NO: 1442 - protein, 119 aa, Artificial Sequence
  Description of Artificial Sequence: Synthetic polypeptide
QVQLVQSGAEVKKPGASVKVSCKASGYAFTNHLIEWVRQAPGQGLEWMGVINPGSDSTDYAQKFQGRVTMTRDTSTSTVYMELSSLRSEDTAVYYCARSLYYNSWFVYWGQGTLVTVSS

SEQ ID NO: 1443 - protein, 119 aa, Artificial Sequence
  Description of Artificial Sequence: Synthetic polypeptide
QVQLVQSGAEVKKPGASVKVSCKASGYAFTNHLIEWVRQAPGQGLEWIGVINPGSDSTDYAQKFQGRVTMTADTSTSTVYMELSSLRSEDTAVYYCARSLYYNSWFVYWGQGTLVTVSS

SEQ ID NO: 1444 - protein, 119 aa, Artificial Sequence
  Description of Artificial Sequence: Synthetic polypeptide
QVQLVQSGAEVKKPGASVKVSCKASGYAFTNHLIEWIRQAPGQGLEWIGVINPGSDSTDYAQKFQGRATLTADTSTSTAYMELSSLRSEDTAVYYCARSLYYNSWFVYWGQGTLVTVSS

SEQ ID NO: 1445 - protein, 119 aa, Artificial Sequence
  Description of Artificial Sequence: Synthetic polypeptide
QVQLVQSGAEVKKPGASVKVSCKASGYAFTNHLIEWIRQAPGQGLEWIGVINPGSDSTDYAQKFQGRATLTADKSTSTAYMELSSLRSEDTAVYYCARSLYYNSWFVYWGQGTLVTVSS

SEQ ID NO: 1446 - protein, 119 aa, Artificial Sequence
  Description of Artificial Sequence: Synthetic polypeptide
QVQLVQSGAEVKKPGASVKVSCKASGYAFTNYLIEWVRQAPGQGLEWMGVINPGSGGIYYAQKFQGRVTMTRDTSTSTVYMELSSLRSEDTAVYYCARSETHDTWFAYWGQGTLVTVSS

SEQ ID NO: 1447 - protein, 119 aa, Artificial Sequence
  Description of Artificial Sequence: Synthetic polypeptide
QVQLVQSGAEVKKPGASVKVSCKASGYAFTNYLIEWVRQAPGQGLEWIGVINPGSGGIYYAQKFQGRVTMTADTSTSTVYMELSSLRSEDTAVYYCARSETHDTWFAYWGQGTLVTVSS

SEQ ID NO: 1448 - protein, 119 aa, Artificial Sequence
  Description of Artificial Sequence: Synthetic polypeptide
QVQLVQSGAEVKKPGASVKVSCKTSGYAFTNYLIEWVRQAPGQGLEWIGVINPGSGGIYYAQKFQGRVTLTADTSTSTAYMELSSLRSEDTAVYYCARSETHDTWFAYWGQGTLVTVSS

SEQ ID NO: 1449 - protein, 119 aa, Artificial Sequence
  Description of Artificial Sequence: Synthetic polypeptide
QVQLVQSGAEVKKPGASVKVSCKTSGYAFTNYLIEWVRQAPGQGLEWIGVINPGSGGIYYAQKFQGRVTLTADKSTSTAYMELSSLRSEDTAVYYCARSETHDTWFAYWGQGTLVTVSS

SEQ ID NO: 1450 - protein, 120 aa, Artificial Sequence
  Description of Artificial Sequence: Synthetic polypeptide
QVQLVQSGAEVKKPGASVKVSCKASGYTFTNYWIGWVRQAPGQGLEWMGDIYPGGGYTNYAQKFQGRVTMTRDTSTSTVYMELSSLRSEDTAVYYCARPYYGSSYGFAFWGQGTLVTVSS

SEQ ID NO: 1451 - protein, 120 aa, Artificial Sequence
  Description of Artificial Sequence: Synthetic polypeptide
QVQLVQSGAEVKKPGASVKVSCKASGYTFTNYWIGWVRQAPGQGLEWIGDIYPGGGYTNYAQKFQGRVTMTADTSTSTVYMELSSLRSEDTAVYYCASPYYGSSYGFAFWGQGTLVTVSS

SEQ ID NO: 1452 - protein, 120 aa, Artificial Sequence
  Description of Artificial Sequence: Synthetic polypeptide
QVQLVQSGAEVKKPGASVKMSCKASGYTFTNYWIGWVRQAPGQGLEWIGDIYPGGGYTNYAQKFQGRATLTADTSTSTAYMELSSLRSEDTAVYYCASPYYGSSYGFAFWGQGTLVTVSS

SEQ ID NO: 1453 - protein, 107 aa, Artificial Sequence
  Description of Artificial Sequence: Synthetic polypeptide
DIQMTQSPSSLSASVGDRVTITCRVSENIYSNLAWYQQKPGKAPKLLIYEATNLAEGVPSRFSGSGSGTDFTLTISSLQPEDFATYYCQHFWGTPYTFGQGTKLEIK

SEQ ID NO: 1454 - protein, 107 aa, Artificial Sequence
  Description of Artificial Sequence: Synthetic polypeptide
DIQMTQSPSSLSASVGDRVTITCRVSENIYSNLAWYQQKPGKAPKLLIYEATNLAEGVPSRFSGSGSGTDYTLTISSLQPEDFATYYCQHFWGTPYTFGQGTKLEIK

SEQ ID NO: 1455 - protein, 107 aa, Artificial Sequence
  Description of Artificial Sequence: Synthetic polypeptide
DIQMTQSPSSLSASVGDRVTITCRVSENIYSNLAWYQQKPGKAPKLLVYEATNLAEGVPSRFSGSGSGTDYTLTISSLQPEDFGTYYCQHFWGTPYTFGQGTKLEIK

SEQ ID NO: 1456 - protein, 106 aa, Artificial Sequence
  Description of Artificial Sequence: Synthetic polypeptide
EIVLTQSPATLSLSPGERATLSCNASSSVSYMYWYQQKPGQAPRLLIYDTSNLASGIPARFSGSGSGTDFTLTISSLEPEDFAVYYCQQWSSYPLTFGQGTKLEIK

SEQ ID NO: 1457 - protein, 106 aa, Artificial Sequence
  Description of Artificial Sequence: Synthetic polypeptide
EIVLTQSPATLSLSPGERATLSCNASSSVSYMYWYQQKPGQAPRLLIYDTSNLASGIPARFSGSGSGTDYTLTISSLEPEDFAVYYCQQWSSYPLTFGQGTKLEIK

SEQ ID NO: 1458 - protein, 106 aa, Artificial Sequence
  Description of Artificial Sequence: Synthetic polypeptide
EIVLTQSPATLSLSPGERVTMSCNASSSVSYMYWYQQKPGQAPRLLIYDTSNLASGVPARFSGSGSGTDYTLTISSMEPEDFAVYYCQQWSSYPLTFGQGTKVEIK

SEQ ID NO: 1459 - protein, 107 aa, Artificial Sequence
  Description of Artificial Sequence: Synthetic polypeptide
DIQMTQSPSSLSASVGDRVTITCRASENIYSYLAWYQQKPGKAPKLLIYNAKTLVEGVPSRFSGSGSGTDFTLTISSLQPEDFATYYCQHHYGTPYTFGQGTKLEIK

SEQ ID NO: 1460 - protein, 107 aa, Artificial Sequence
  Description of Artificial Sequence: Synthetic polypeptide
DIQMTQSPSSLSASVGDRVTITCRASENIYSYLAWYQQKPGKAPKLLVYNAKTLVEGVPSRFSGSGSGTDFTLTISSLQPEDFGTYYCQHHYGTPYTFGQGTKLEIK

SEQ ID NO: 1461 - protein, 107 aa, Artificial Sequence
  Description of Artificial Sequence: Synthetic polypeptide
DIQMTQSPSSLSASVGDRVTITCKASQSVRIAVAWYQQKPGKAPKLLIYLASTRHTGVPSRFSGSGSGTDFTLTISSLQPEDFATYYCLQHWNYPYTFGQGTKLEIK

SEQ ID NO: 1462 - protein, 107 aa, Artificial Sequence
  Description of Artificial Sequence: Synthetic polypeptide
DIQMTQSPSSLSASVGDRVTITCKASQSVRIAVAWFQQKPGKAPKALIYLASTRHTGVPSRFSGSGSGTDFTLTISSVQPEDFATYYCLQHWNYPYTFGQGTKLEIK

SEQ ID NO: 1463 - protein, 131 aa, Homo sapiens
TPEVWVQVRMEATELSSFTIRCGFLGSGSISLVTVSWGGPNGAGGTTLAVLHPERGIRQWAPARQARWETQSSISLILEGSGASSPCANTTFCCKFASFPEGSWEACGSLPPSSDPGLSAPPTPAPILRAD

SEQ ID NO: 1464 - protein, 131 aa, Macaca fascicularis
TPEVWVQVQMEATELSSFTVHCGFLGPGSISLVTVSWGGPDGAGGTKLAVLHPELGTRQWAPARQARWETQSSISLALEDSGASSPFANTTFCCKFASFPEGSWESCGSLPPSSDPGLSAPPTPVPILRAD

SEQ ID NO: 1465 - protein, 126 aa, Callithrix jacchus
TPEVWVQVQMKATELSSFIVHCGFLGSGSISLVTVSWGGPDGAGGTRLAVLHPELGTRQWAPAHQARWETQSSISLVLEEPGASSPSANTTFCCKFASFPEGSWEACGSLPPSSDPGLSAPILRAD

SEQ ID NO: 1466 - protein, 131 aa, Macaca mulatta; identical to SEQ ID NO: 1464

SEQ ID NO: 1467 - protein, 131 aa, Homo sapiens; identical to SEQ ID NO: 1463

SEQ ID NO: 1468 - protein, 151 aa, Homo sapiens
MGHRTLVLPWVLLTLCVTAGTPEVWVQVRMEATELSSFTIRCGFLGSGSISLVTVSWGGPNGAGGTTLAVLHPERGIRQWAPARQARWETQSSISLILEGSGASSPCANTTFCCKFASFPEGSWEACGSLPPSSDPGLSAPPTPAPILRAD

SEQ ID NO: 1469 - protein, 104 aa, Homo sapiens
EVWVQVRMEATELSSFTIRCGFLGSGSISLVTVSWGGPNGAGGTTLAVLHPERGIRQWAPARQARWETQSSISLILEGSGASSPCANTTFCCKFASFPEGSWEA

SEQ ID NO: 1470 - protein, 179 aa, Artificial Sequence
  Description of Artificial Sequence: Synthetic polypeptide
MGHRTLVLPWVLLTLCVTAGTPEVWVQVRMEATELSSFTIRCGFLGSGSISLVTVSWGGPNGAGGTTLAVLHPERGIRQWAPARQARWETQSSISLILEGSGASSPCANTTFCCKFASFPEGSWEACGSLPPSSDPGLSAPPTPAPILRADLAGILGVSGVLLFGCVYLLHLLRRHKHR

SEQ ID NO: 1471 - protein, 191 aa, Artificial Sequence
  Description of Artificial Sequence: Synthetic polypeptide
MGHRTLVLPWVLLTLCVTAGTPEVWVQVRMEATELSSFTIRCGFLGSGSISLVTVSWGGPNGAGGTTLAVLHPERGIRQWAPARQARWETQSSISLILEGSGASSPCANTTFCCKFASFPEGSWEACGSLPPSSDPGLSVPPTPAPILRADLAGILGVSGVLLFDCGYLLHLLCRQKHRPAPRLQPSHTSS

SEQ ID NO: 1472 - protein, 211 aa, Artificial Sequence
  Description of Artificial Sequence: Synthetic polypeptide
MGHRTLVLPWVLLTLCVTAGTPEVWVQVRMEATELSSFTIRWLSAPPTPAPILRADLAGILGVSGVLLFGCVYLLHLLRRHKHRPAPRLQPSRTSPQAPRARAWAPSQASQAALHVPYATINTSCRPATLDTAHPHGGPSWWASLPTHAAHRPQGPAAWASTPIPARGSFVSVENGLYAQAGERPPHTGPGLTLFPDPRGPRAMEGPLGVR

SEQ ID NO: 1473 - protein, 189 aa, Artificial Sequence
  Description of Artificial Sequence: Synthetic polypeptide
MGHRTLVLPWVLLTLCVTAGLSAPPTPAPILRADLAGILGVSGVLLFGCVYLLHLLRRHKHRPAPRLQPSRTSPQAPRARAWAPSQASQAALHVPYATINTSCRPATLDTAHPHGGPSWWASLPTHAAHRPQGPAAWASTPIPARGSFVSVENGLYAQAGERPPHTGPGLTLFPDPRGPRAMEGPLGVR

SEQ ID NO: 1474 - protein, 74 aa, Artificial Sequence
  Description of Artificial Sequence: Synthetic polypeptide
MGHRTLVLPWVLLTLCVTAGLSVPPTPAPILRADLAGILGVSGVLLFDCGYLLHLLCRQKHRPAPRLQPSHTSS

SEQ ID NO: 1475 - protein, 203 aa, Artificial Sequence [sequence omitted]

SEQ ID NO: 1476 - protein, 230 aa, Artificial Sequence
  Description of Artificial Sequence: Synthetic polypeptide
MGHRTLVLPWVLLTLCVTAGTPEVWVQVRMEATELSSFTIRCGFLGSGSISLVTVSWGGPNGAGGTTLAVLHPERGAQISPRGPKIGGPPCPRPGPAGKPRAASLSSWKALGPAAPAPTPPSAASLRPSQAALHVPYATINTSCRPATLDTAHPHGGPSWWASLPTHAAHRPQGPAAWASTPIPARGSFVSVENGLYAQAGERPPHTGPGLTLFPDPRGPRAMEGPLGVR

SEQ ID NO: 1477 - protein, 182 aa, Artificial Sequence
  Description of Artificial Sequence: Synthetic polypeptide
MGHRTLVLPWVLLTLCVTAGTPEVWVQVRMEATELSSFTIRCGFLGSGSISLVTVSWGGPNGAGGTTLAVLHPERGIRQWAPARQARWETQSSISLILEGSGASSPCANTTFCCKFASFPGCSSRPLCHYQHQLPPSYFGHSSPPWGAVLVGVTPHPRCTPAPGPCRLGLHTHPCTWQLCLC

SEQ ID NO: 1478 - protein, 183 aa, Artificial Sequence
  Description of Artificial Sequence: Synthetic polypeptide
TPEVWVQVRMEATELSSFTIRCGFLGSGSISLVTVSWGGPNGAGGTTLAVLHPERGIRQWAPARQARWETQSSISLILEGSGASSPCANTTFCCKFASFPEGSWEACGSLPPSSDPGGAGARGPGGQGGARELATHLILVSVPRALCPADSCPHSAGRPGRDLGGLRSPPLWLCLPPSSAAPT

SEQ ID NO: 1479 - protein, 210 aa, Artificial Sequence
  Description of Artificial Sequence: Synthetic polypeptide
TPEVWVQVRMEATELSSFTIRCGFLGSGSISLVTVSWGGPNGAGGTTLAVLHPERGAQISPRGPKIGGPPCPRPGPAGKPRAASLSSWKALGPAAPAPTPPSAASLRPSQAALHVPYATINTSCRPATLDTAHPHGGPSWWASLPTHAAHRPQGPAAWASTPIPARGSFVSVENGLYAQAGERPPHTGPGLTLFPDPRGPRAMEGPLGVR

SEQ ID NO: 1480 - protein, 162 aa, Artificial Sequence
  Description of Artificial Sequence: Synthetic polypeptide
TPEVWVQVRMEATELSSFTIRCGFLGSGSISLVTVSWGGPNGAGGTTLAVLHPERGIRQWAPARQARWETQSSISLILEGSGASSPCANTTFCCKFASFPGCSSRPLCHYQHQLPPSYFGHSSPPWGAVLVGVTPHPRCTPAPGPCRLGLHTHPCTWQLCLC

SEQ ID NO: 1481 - protein, 66 aa, Artificial Sequence
  Description of Artificial Sequence: Synthetic polypeptide
GAGARGPGGQGGARELATHLILVSVPRALCPADSCPHSAGRPGRDLGGLRSPPLWLCLPPSSAAPT

SEQ ID NO: 1482 - protein, 154 aa, Artificial Sequence
  Description of Artificial Sequence: Synthetic polypeptide
AQISPRGPKIGGPPCPRPGPAGKPRAASLSSWKALGPAAPAPTPPSAASLRPSQAALHVPYATINTSCRPATLDTAHPHGGPSWWASLPTHAAHRPQGPAAWASTPIPARGSFVSVENGLYAQAGERPPHTGPGLTLFPDPRGPRAMEGPLGVR

SEQ ID NO: 1483 - protein, 52 aa, Artificial Sequence
  Description of Artificial Sequence: Synthetic polypeptide
AQISPRGPKIGGPPCPRPGPAGKPRAASLSSWKALGPAAPAPTPPSAASLRP

SEQ ID NO: 1484 - protein, 62 aa, Artificial Sequence
  Description of Artificial Sequence: Synthetic polypeptide
GCSSRPLCHYQHQLPPSYFGHSSPPWGAVLVGVTPHPRCTPAPGPCRLGLHTHPCTWQLCLC

SEQ ID NO: 1485 - protein, 129 aa, Homo sapiens
TPEVWVQVRMEATELSSFTIRCGFLGSGSISLVTVSWGGPNGAGGTTLAVLHPERGIRQWAPARQARWETQSSISLILEGSGASSPCANTTFCCKFASFPEGSWEACGSLPPSSDPGLSAPPTPAPILR

SEQ ID NO: 1486 - protein, 130 aa, Homo sapiens
TPEVWVQVRMEATELSSFTIRCGFLGSGSISLVTVSWGGPNGAGGTTLAVLHPERGIRQWAPARQARWETQSSISLILEGSGASSPCANTTFCCKFASFPEGSWEACGSLPPSSDPGLSAPPTPAPILRA

SEQ ID NO: 1487 - protein, 132 aa, Homo sapiens
TPEVWVQVRMEATELSSFTIRCGFLGSGSISLVTVSWGGPNGAGGTTLAVLHPERGIRQWAPARQARWETQSSISLILEGSGASSPCANTTFCCKFASFPEGSWEACGSLPPSSDPGLSAPPTPAPILRADL

SEQ ID NO: 1488 - protein, 133 aa, Homo sapiens
TPEVWVQVRMEATELSSFTIRCGFLGSGSISLVTVSWGGPNGAGGTTLAVLHPERGIRQWAPARQARWETQSSISLILEGSGASSPCANTTFCCKFASFPEGSWEACGSLPPSSDPGLSAPPTPAPILRADLA

SEQ ID NO: 1489 - protein, 104 aa, Homo sapiens
TPEVWVQVRMEATELSSFTIRCGFLGSGSISLVTVSWGGPNGAGGTTLAVLHPERGIRQWAPARQARWETQSSISLILEGSGASSPCANTTFCCKFASFPEGSW

SEQ ID NO: 1490 - protein, 105 aa, Homo sapiens
TPEVWVQVRMEATELSSFTIRCGFLGSGSISLVTVSWGGPNGAGGTTLAVLHPERGIRQWAPARQARWETQSSISLILEGSGASSPCANTTFCCKFASFPEGSWE

SEQ ID NO: 1491 - protein, 106 aa, Homo sapiens
TPEVWVQVRMEATELSSFTIRCGFLGSGSISLVTVSWGGPNGAGGTTLAVLHPERGIRQWAPARQARWETQSSISLILEGSGASSPCANTTFCCKFASFPEGSWEA

SEQ ID NO: 1492 - protein, 107 aa, Homo sapiens
TPEVWVQVRMEATELSSFTIRCGFLGSGSISLVTVSWGGPNGAGGTTLAVLHPERGIRQWAPARQARWETQSSISLILEGSGASSPCANTTFCCKFASFPEGSWEAC

SEQ ID NO: 1493 - protein, 108 aa, Homo sapiens
TPEVWVQVRMEATELSSFTIRCGFLGSGSISLVTVSWGGPNGAGGTTLAVLHPERGIRQWAPARQARWETQSSISLILEGSGASSPCANTTFCCKFASFPEGSWEACG

SEQ ID NO: 1494 - protein, 103 aa, Homo sapiens
PEVWVQVRMEATELSSFTIRCGFLGSGSISLVTVSWGGPNGAGGTTLAVLHPERGIRQWAPARQARWETQSSISLILEGSGASSPCANTTFCCKFASFPEGSW

SEQ ID NO: 1495 - protein, 104 aa, Homo sapiens
PEVWVQVRMEATELSSFTIRCGFLGSGSISLVTVSWGGPNGAGGTTLAVLHPERGIRQWAPARQARWETQSSISLILEGSGASSPCANTTFCCKFASFPEGSWE

SEQ ID NO: 1496 - protein, 105 aa, Homo sapiens
PEVWVQVRMEATELSSFTIRCGFLGSGSISLVTVSWGGPNGAGGTTLAVLHPERGIRQWAPARQARWETQSSISLILEGSGASSPCANTTFCCKFASFPEGSWEA

SEQ ID NO: 1497 - protein, 106 aa, Homo sapiens
PEVWVQVRMEATELSSFTIRCGFLGSGSISLVTVSWGGPNGAGGTTLAVLHPERGIRQWAPARQARWETQSSISLILEGSGASSPCANTTFCCKFASFPEGSWEAC

SEQ ID NO: 1498 - protein, 107 aa, Homo sapiens
PEVWVQVRMEATELSSFTIRCGFLGSGSISLVTVSWGGPNGAGGTTLAVLHPERGIRQWAPARQARWETQSSISLILEGSGASSPCANTTFCCKFASFPEGSWEACG

SEQ ID NO: 1499 - protein, 102 aa, Homo sapiens
EVWVQVRMEATELSSFTIRCGFLGSGSISLVTVSWGGPNGAGGTTLAVLHPERGIRQWAPARQARWETQSSISLILEGSGASSPCANTTFCCKFASFPEGSW

SEQ ID NO: 1500 - protein, 103 aa, Homo sapiens
EVWVQVRMEATELSSFTIRCGFLGSGSISLVTVSWGGPNGAGGTTLAVLHPERGIRQWAPARQARWETQSSISLILEGSGASSPCANTTFCCKFASFPEGSWE

SEQ ID NO: 1501 - protein, 105 aa, Homo sapiens
EVWVQVRMEATELSSFTIRCGFLGSGSISLVTVSWGGPNGAGGTTLAVLHPERGIRQWAPARQARWETQSSISLILEGSGASSPCANTTFCCKFASFPEGSWEAC

SEQ ID NO: 1502 - protein, 106 aa, Homo sapiens
EVWVQVRMEATELSSFTIRCGFLGSGSISLVTVSWGGPNGAGGTTLAVLHPERGIRQWAPARQARWETQSSISLILEGSGASSPCANTTFCCKFASFPEGSWEACG

SEQ ID NO: 1503 - protein, 101 aa, Homo sapiens
VWVQVRMEATELSSFTIRCGFLGSGSISLVTVSWGGPNGAGGTTLAVLHPERGIRQWAPARQARWETQSSISLILEGSGASSPCANTTFCCKFASFPEGSW

SEQ ID NO: 1504 - protein, 102 aa, Homo sapiens
VWVQVRMEATELSSFTIRCGFLGSGSISLVTVSWGGPNGAGGTTLAVLHPERGIRQWAPARQARWETQSSISLILEGSGASSPCANTTFCCKFASFPEGSWE

SEQ ID NO: 1505 - protein, 103 aa, Homo sapiens
VWVQVRMEATELSSFTIRCGFLGSGSISLVTVSWGGPNGAGGTTLAVLHPERGIRQWAPARQARWETQSSISLILEGSGASSPCANTTFCCKFASFPEGSWEA

SEQ ID NO: 1506 - protein, 104 aa, Homo sapiens
VWVQVRMEATELSSFTIRCGFLGSGSISLVTVSWGGPNGAGGTTLAVLHPERGIRQWAPARQARWETQSSISLILEGSGASSPCANTTFCCKFASFPEGSWEAC

SEQ ID NO: 1507 - protein, 105 aa, Homo sapiens
VWVQVRMEATELSSFTIRCGFLGSGSISLVTVSWGGPNGAGGTTLAVLHPERGIRQWAPARQARWETQSSISLILEGSGASSPCANTTFCCKFASFPEGSWEACG

SEQ ID NO: 1508 - protein, 100 aa, Homo sapiens
WVQVRMEATELSSFTIRCGFLGSGSISLVTVSWGGPNGAGGTTLAVLHPERGIRQWAPARQARWETQSSISLILEGSGASSPCANTTFCCKFASFPEGSW

SEQ ID NO: 1509 - protein, 101 aa, Homo sapiens
WVQVRMEATELSSFTIRCGFLGSGSISLVTVSWGGPNGAGGTTLAVLHPERGIRQWAPARQARWETQSSISLILEGSGASSPCANTTFCCKFASFPEGSWE

SEQ ID NO: 1510 - protein, 102 aa, Homo sapiens
WVQVRMEATELSSFTIRCGFLGSGSISLVTVSWGGPNGAGGTTLAVLHPERGIRQWAPARQARWETQSSISLILEGSGASSPCANTTFCCKFASFPEGSWEA

SEQ ID NO: 1511 - protein, 103 aa, Homo sapiens
WVQVRMEATELSSFTIRCGFLGSGSISLVTVSWGGPNGAGGTTLAVLHPERGIRQWAPARQARWETQSSISLILEGSGASSPCANTTFCCKFASFPEGSWEAC

SEQ ID NO: 1512 - protein, 104 aa, Homo sapiens
WVQVRMEATELSSFTIRCGFLGSGSISLVTVSWGGPNGAGGTTLAVLHPERGIRQWAPARQARWETQSSISLILEGSGASSPCANTTFCCKFASFPEGSWEACG

SEQ ID NO: 1513 - protein, 234 aa, Mus musculus
MRTGNTQAAHATNMGQMQTLVLFSTLLTLCVSEASPEVWVQVQMEATNLSSFSVHCGVLGYSLISLVTVSCEGFVDAGRTKLAVLHPEFGTQQWAPARQAHWETPNSVSVTLTMGQSKARSSLANTTFCCEFVTFPHGSRVACRDLHRSDPGLSAPTPALNLQADLVRILGTSGVFLFGFIFILCLRWQQRHWCLSKSQPSLTSTQAQVETQPPHLASTHSSFISMENGLYALA

SEQ ID NO: 1514 - protein, 221 aa, Mus musculus
MGQMQTLVLFSTLLTLCVSEASPEVWVQVQMEATNLSSFSVHCGVLGYSLISLVTVSCEGFVDAGRTKLAVLHPEFGTQQWAPARQAHWETPNSVSVTLTMGQSKARSSLANTTFCCEFVTFPHGSRVACRDLHRSDPGLSAPTPALNLQADLVRILGTSGVFLFGFIFILCLRWQQRHWCLSKSQPSLTSTQAQVETQPPHLASTHSSFISMENGLYALA

SEQ ID NO: 1515 - protein, 131 aa, Mus musculus
SPEVWVQVQMEATNLSSFSVHCGVLGYSLISLVTVSCEGFVDAGRTKLAVLHPEFGTQQWAPARQAHWETPNSVSVTLTMGQSKARSSLANTTFCCEFVTFPHGSRVACRDLHRSDPGLSAPTPALNLQAD

SEQ ID NO: 1516 - protein, 152 aa, Mus musculus
MGQMQTLVLFSTLLTLCVSEASPEVWVQVQMEATNLSSFSVHCGVLGYSLISLVTVSCEGFVDAGRTKLAVLHPEFGTQQWAPARQAHWETPNSVSVTLTMGQSKARSSLANTTFCCEFVTFPHGSRVACRDLHRSDPGLSAPTPALNLQAD

SEQ ID NO: 1517 - protein, 363 aa, Artificial Sequence
  Description of Artificial Sequence: Synthetic polypeptide
TPEVWVQVRMEATELSSFTIRCGFLGSGSISLVTVSWGGPNGAGGTTLAVLHPERGIRQWAPARQARWETQSSISLILEGSGASSPCANTTFCCKFASFPEGSWEACGSLPPSSDPGLSAPPTPAPILRADEPKSSDKTHTCPPCPAPELLGGPSVFLFPPKPKDTLMISRTPEVTCVVVDVSHEDPEVKFNWYVDGVEVHNAKTKPREEQYNSTYRVVSVLTVLHQDWLNGKEYKCKVSNKALPAPIEKTISKAKGQPREPQVYTLPPSRDELTKNQVSLTCLVKGFYPSDIAVEWESNGQPENNYKTTPPVLDSDGSFFLYSKLTVDKSRWQQGNVFSCSVMHEALHNHYTQKSLSLSPGK

SEQ ID NO: 1518 - protein, 363 aa, Artificial Sequence
  Description of Artificial Sequence: Synthetic polypeptide
TPEVWVQVRMEATELSSFTIRCGFLGSGSISLVTVSWGGPNGAGGTTLAVLHPERGIRQWAPARQARWETQSSISLILEGSGASSPFANTTFCCKFASFPEGSWEASGSLPPSSDPGLSAPPTPAPILRADEPKSSDKTHTCPPCPAPELLGGPSVFLFPPKPKDTLMISRTPEVTCVVVDVSHEDPEVKFNWYVDGVEVHNAKTKPREEQYNSTYRVVSVLTVLHQDWLNGKEYKCKVSNKALPAPIEKTISKAKGQPREPQVYTLPPSRDELTKNQVSLTCLVKGFYPSDIAVEWESNGQPENNYKTTPPVLDSDGSFFLYSKLTVDKSRWQQGNVFSCSVMHEALHNHYTQKSLSLSPGK

SEQ ID NO: 1519 - protein, 363 aa, Artificial Sequence
  Description of Artificial Sequence: Synthetic polypeptide
TPEVWVQVRMEATELSSFTIRCGFLGSGSISLVTVSWGGPNGAGGTTLAVLHPERGIRQWAPARQARWETQSSISLILEGSGASSPCANTTFCCKFASFPEGSWEACGSLPPSSDPGLSAPPTPAPILRADEPKSSDKTHTSPPSPAPELLGGPSVFLFPPKPKDTLMISRTPEVTCVVVDVSHEDPEVKFNWYVDGVEVHNAKTKPREEQYNSTYRVVSVLTVLHQDWLNGKEYKCKVSNKALPAPIEKTISKAKGQPREPQVYTLPPSRDELTKNQVSLTCLVKGFYPSDIAVEWESNGQPENNYKTTPPVLDSDGSFFLYSKLTVDKSRWQQGNVFSCSVMHEALHNHYTQKSLSLSPGK

SEQ ID NO: 1520 - protein, 363 aa, Artificial Sequence
  Description of Artificial Sequence: Synthetic polypeptide
TPEVWVQVRMEATELSSFTIRCGFLGSGSISLVTVSWGGPNGAGGTTLAVLHPERGIRQWAPARQARWETQSSISLILEGSGASSPFANTTFCCKFASFPEGSWEACGSLPPSSDPGLSAPPTPAPILRADEPKSSDKTHTSPPSPAPELLGGPSVFLFPPKPKDTLMISRTPEVTCVVVDVSHEDPEVKFNWYVDGVEVHNAKTKPREEQYNSTYRVVSVLTVLHQDWLNGKEYKCKVSNKALPAPIEKTISKAKGQPREPQVYTLPPSRDELTKNQVSLTCLVKGFYPSDIAVEWESNGQPENNYKTTPPVLDSDGSFFLYSKLTVDKSRWQQGNVFSCSVMHEALHNHYTQKSLSLSPGK

SEQ ID NO: 1521 - protein, 364 aa, Artificial Sequence
  Description of Artificial Sequence: Synthetic polypeptide
SPEVWVQVQMEATNLSSFSVHCGVLGYSLISLVTVSCEGFVDAGRTKLAVLHPEFGTQQWAPARQAHWETPNSVSVTLTMGQSKARSSLANTTFCCEFVTFPHGSRVACRDLHRSDPGLSAPTPALNLQADEPRGPTIKPCPPCKCPAPNLLGGPSVFIFPPKIKDVLMISLSPIVTCVVVDVSEDDPDVQISWFVNNVEVHTAQTQTHREDYNSTLRVVSALPIQHQDWMSGKEFKCKVNNKDLPAPIERTISKPKGSVRAPQVYVLPPPEEEMTKKQVTLTCMVTDFMPEDIYVEWTNNGKTELNYKNTEPVLDSDGSYFMYSKLRVEKKNWVERNSYSCSVVHEGLHNHHTTKSFSRTPGK

SEQ ID NO: 1522 - protein, 364 aa, Artificial Sequence
  Description of Artificial Sequence: Synthetic polypeptide
SPEVWVQVQMEATNLSSFSVHCGVLGYSLISLVTVSCEGFVDAGRTKLAVLHPEFGTQQWAPARQAHWETPNSVSVTLTMGQSKARSSLANTTFCCEFVTFPHGSRVACRDLHRSDPGLSAPTPALNLQADEPRGPTIKPSPPSKSPAPNLLGGPSVFIFPPKIKDVLMISLSPIVTCVVVDVSEDDPDVQISWFVNNVEVHTAQTQTHREDYNSTLRVVSALPIQHQDWMSGKEFKCKVNNKDLPAPIERTISKPKGSVRAPQVYVLPPPEEEMTKKQVTLTCMVTDFMPEDIYVEWTNNGKTELNYKNTEPVLDSDGSYFMYSKLRVEKKNWVERNSYSCSVVHEGLHNHHTTKSFSRTPGK

SEQ ID NO: 1523 - protein, 232 aa, Homo sapiens; identical to SEQ ID NO: 5

SEQ ID NO: 1524 - protein, 232 aa, Artificial Sequence
  Description of Artificial Sequence: Synthetic polypeptide
EPKSSDKTHTCPPCPAPELLGGPSVFLFPPKPKDTLMISRTPEVTCVVVDVSHEDPEVKFNWYVDGVEVHNAKTKPREEQYNSTYRVVSVLTVLHQDWLNGKEYKCKVSNKALPAPIEKTISKAKGQPREPQVYTLPPSRDELTKNQVSLTCLVKGFYPSDIAVEWESNGQPENNYKTTPPVLDSDGSFFLYSKLTVDKSRWQQGNVFSCSVMHEALHNHYTQKSLSLSPGK

SEQ ID NO: 1525 - protein, 232 aa, Artificial Sequence
  Description of Artificial Sequence: Synthetic polypeptide
EPKSSDKTHTCPPCPAPELLGGPSVFLFPPKPKDTLMISRTPEVTCVVVDVSHEDPEVKFNWYVDGVEVHNAKTKPREEQYASTYRVVSVLTVLHQDWLNGKEYKCKVSNKALPAPIEKTISKAKGQPREPQVYTLPPSRDELTKNQVSLTCLVKGFYPSDIAVEWESNGQPENNYKTTPPVLDSDGSFFLYSKLTVDKSRWQQGNVFSCSVMHEALHNHYTQKSLSLSPGK

SEQ ID NO: 1526 - protein, 217 aa, Artificial Sequence; identical to SEQ ID NO: 6
  Description of Artificial Sequence: Synthetic polypeptide

SEQ ID NO: 1527 - protein, 233 aa, Mus musculus; identical to SEQ ID NO: 7

SEQ ID NO: 1528 - protein, 233 aa, Artificial Sequence
  Description of Artificial Sequence: Synthetic polypeptide
EPRGPTIKPCPPCKCPAPNLLGGPSVFIFPPKIKDVLMISLSPIVTCVVVDVSEDDPDVQISWFVNNVEVHTAQTQTHREDYASTLRVVSALPIQHQDWMSGKEFKCKVNNKDLPAPIERTISKPKGSVRAPQVYVLPPPEEEMTKKQVTLTCMVTDFMPEDIYVEWTNNGKTELNYKNTEPVLDSDGSYFMYSKLRVEKKNWVERNSYSCSVVHEGLHNHHTTKSFSRTPGK

SEQ ID NO: 1529 - protein, 217 aa, Artificial Sequence
  Description of Artificial Sequence: Synthetic polypeptide
APNLLGGPSVFIFPPKIKDVLMISLSPIVTCVVVDVSEDDPDVQISWFVNNVEVHTAQTQTHREDYNSTLRVVSALPIQHQDWMSGKEFKCKVNNKDLPAPIERTISKPKGSVRAPQVYVLPPPEEEMTKKQVTLTCMVTDFMPEDIYVEWTNNGKTELNYKNTEPVLDSDGSYFMYSKLRVEKKNWVERNSYSCSVVHEGLHNHHTTKSFSRTPGK

SEQ ID NO: 1530 - protein, 232 aa, Artificial Sequence
  Description of Artificial Sequence: Synthetic polypeptide
EPKSSDKTHTSPPSPAPELLGGPSVFLFPPKPKDTLMISRTPEVTCVVVDVSHEDPEVKFNWYVDGVEVHNAKTKPREEQYNSTYRVVSVLTVLHQDWLNGKEYKCKVSNKALPAPIEKTISKAKGQPREPQVYTLPPSRDELTKNQVSLTCLVKGFYPSDIAVEWESNGQPENNYKTTPPVLDSDGSFFLYSKLTVDKSRWQQGNVFSCSVMHEALHNHYTQKSLSLSPGK

SEQ ID NO: 1531 - DNA, 20 bp, Artificial Sequence
  Description of Artificial Sequence: Synthetic primer
ccaccaacctctcgtctttc

SEQ ID NO: 1532 - DNA, 18 bp, Artificial Sequence
  Description of Artificial Sequence: Synthetic primer
tcatgccagagcatacag

SEQ ID NO: 1533 - DNA, 20 bp, Artificial Sequence
  Description of Artificial Sequence: Synthetic primer
cagtgcctctaactgctgac

SEQ ID NO: 1534 - DNA, 22 bp, Artificial Sequence
  Description of Artificial Sequence: Synthetic primer
tcactgttaccagggagatgag

SEQ ID NO: 1535 - DNA, 19 bp, Artificial Sequence
  Description of Artificial Sequence: Synthetic primer
cacaggctgcccatgcaac

SEQ ID NO: 1536 - DNA, 20 bp, Artificial Sequence
  Description of Artificial Sequence: Synthetic primer
tgcctgggtgctagtgagag

SEQ ID NO: 1537 - DNA, 20 bp, Artificial Sequence
  Description of Artificial Sequence: Synthetic primer
ccaccaacctctcgtctttc

SEQ ID NO: 1538 - DNA, 20 bp, Artificial Sequence
  Description of Artificial Sequence: Synthetic primer
gaccctgttacctgtcattg

SEQ ID NO: 1539 - protein, 314 aa, Artificial Sequence
  Description of Artificial Sequence: Synthetic polypeptide
MGHRTLVLPWVLLTLCVTAGTPEVWVQVRMEATELSSFTIRCGFLGSGSISLVTVSWGGPNGAGGTTLAVLHPERGIRQWAPARQARWETQSSISLILEGSGASSPCANTTFCCKFASFPEGSWEACGSLPPSSDPGLSAPPTPAPILRADLAGILGVSGVLLFGCVYLLHLLRRHKHRPAPRLQPSRTSPQAPRARAWAPSQASQAALHVPYATINTSCRPATLDTAHPHGGPSWWASLPTHAAHRPQGPAAWASTPIPARGSFVSVENGLYAQAGERPPHTGPGLTLFPDPRGPRAMEGPLGVRDYKDDDDK

SEQ ID NO: 1540 - protein, 242 aa, Artificial Sequence
  Description of Artificial Sequence: Synthetic polypeptide
MRTGNTQAAHATNMGQMQTLVLFSTLLTLCVSEADYKDDDDKSPEVWVQVQMEATNLSSFSVHCGVLGYSLISLVTVSCEGFVDAGRTKLAVLHPEFGTQQWAPARQAHWETPNSVSVTLTMGQSKARSSLANTTFCCEFVTFPHGSRVACRDLHRSDPGLSAPTPALNLQADLVRILGTSGVFLFGFIFILCLRWQQRHWCLSKSQPSLTSTQAQVETQPPHLASTHSSFISMENGLYALA

SEQ ID NO: 1541 - protein, 218 aa, Artificial Sequence
  Description of Artificial Sequence: Synthetic polypeptide
MQTLVLFSTLLTLCVSEASPEVWVQVQMEATNLSSFSVHCGVLGYSLISLVTVSCEGFVDAGRTKLAVLHPEFGTQQWAPARQAHWETPNSVSVTLTMGQSKARSSLANTTFCCEFVTFPHGSRVACRDLHRSDPGLSAPTPALNLQADLVRILGTSGVFLFGFIFILCLRWQQRHWCLSKSQPSLTSTQAQVETQPPHLASTHSSFISMENGLYALA

SEQ ID NO: 1542 - protein, 226 aa, Artificial Sequence
  Description of Artificial Sequence: Synthetic polypeptide
MQTLVLFSTLLTLCVSEADYKDDDDKSPEVWVQVQMEATNLSSFSVHCGVLGYSLISLVTVSCEGFVDAGRTKLAVLHPEFGTQQWAPARQAHWETPNSVSVTLTMGQSKARSSLANTTFCCEFVTFPHGSRVACRDLHRSDPGLSAPTPALNLQADLVRILGTSGVFLFGFIFILCLRWQQRHWCLSKSQPSLTSTQAQVETQPPHLASTHSSFISMENGLYALA

SEQ ID NO: 1543 - DNA, 20 bp, Artificial Sequence
  Description of Artificial Sequence: Synthetic primer
cttgtgttcaccacctctgg

SEQ ID NO: 1544 - DNA, 20 bp, Artificial Sequence
  Description of Artificial Sequence: Synthetic primer
tgttctcatcgcaggaggtc

SEQ ID NO: 1545 - DNA, 20 bp, Artificial Sequence
  Description of Artificial Sequence: Synthetic primer
ttggctgtggatacctcctt

SEQ ID NO: 1546 - DNA, 20 bp, Artificial Sequence
  Description of Artificial Sequence: Synthetic primer
ataagggtcgtggagagcag

SEQ ID NO: 1547 - DNA, 20 bp, Artificial Sequence
  Description of Artificial Sequence: Synthetic primer
ccaccaacctctcgtctttc

SEQ ID NO: 1548 - DNA, 18 bp, Artificial Sequence
  Description of Artificial Sequence: Synthetic primer
tcatgccagagcatacag

SEQ ID NO: 1549 - DNA, 20 bp, Artificial Sequence
  Description of Artificial Sequence: Synthetic primer
cagtgcctctaactgctgac

SEQ ID NO: 1550 - DNA, 22 bp, Artificial Sequence
  Description of Artificial Sequence: Synthetic primer
tcactgttaccagggagatgag

SEQ ID NO: 1551 - DNA, 19 bp, Artificial Sequence
  Description of Artificial Sequence: Synthetic primer
cacaggctgcccatgcaac

SEQ ID NO: 1552 - DNA, 20 bp, Artificial Sequence
  Description of Artificial Sequence: Synthetic primer
tgcctgggtgctagtgagag

SEQ ID NO: 1553 - DNA, 20 bp, Artificial Sequence
  Description of Artificial Sequence: Synthetic primer
ccaccaacctctcgtctttc

SEQ ID NO: 1554 - DNA, 20 bp, Artificial Sequence
  Description of Artificial Sequence: Synthetic primer
gaccctgttacctgtcattg

SEQ ID NO: 1555 - protein, 8 aa, Artificial Sequence
  Description of Artificial Sequence: Synthetic peptide
DYKDDDDK

SEQ ID NO: 1556 - protein, 6 aa, Artificial Sequence
  Description of Artificial Sequence: Synthetic 6xHis tag
HHHHHH

SEQ ID NO: 1557 - protein, 326 aa, Artificial Sequence
  Description of Artificial Sequence: Synthetic polypeptide
MRTEAQVPALQPPEPGLEGAMGHRTLVLPWVLLTLCVTAGTPEVWVQVRMEATELSSFTIRCGFLGSGSISLVTVSWGGPNGAGGTTLAVLHPERGIRQWAPARQARWETQSSISLILEGSGASSPCANTTFCCKFASFPEGSWEACGSLPPSSDPGLSAPPTPAPILRADLAGILGVSGVLLFGCVYLLHLLRRHKHRPAPRLQPSRTSPQAPRARAWAPSQASQAALHVPYATINTSCRPATLDTAHPHGGPSWWASLPTHAAHRPQGPAAWASTPIPARGSFVSVENGLYAQAGERPPHTGPGLTLFPDPRGPRAMEGPLGVR

SEQ ID NO: 1558 - protein, 326 aa, Artificial Sequence
  Description of Artificial Sequence: Synthetic polypeptide
MRTEAQVPALQPPEPGLEGAMGHRTLVLPWVLLTLCVTAGTPEVWVQVRMEATELSSFTIRCGFLGSGSISLVTVSWGGPDGAGGTTLAVLHPERGIRQWAPARQARWETQSSISLILEGSGASSPCANTTFCCKFASFPEGSWEACGSLPPSSDPGLSAPPTPAPILRADLAGILGVSGVLLFGCVYLLHLLRRHKHRPAPRLQPSRTSPQAPRARAWAPSQASQAALHVPYATINTSCRPATLDTAHPHGGPSWWASLPTHAAHRPQGPAAWASTPIPARGSFVSVENGLYAQAGERPPHTGPGLTLFPDPRGPRAMEGPLGVR

SEQ ID NO: 1559 - protein, 199 aa, Artificial Sequence
  Description of Artificial Sequence: Synthetic polypeptide
MRTEAQVPALQPPEPGLEGAMGHRTLVLPWVLLTLCVTAGTPEVWVQVRMEATELSSFTIRCGFLGSGSISLVTVSWGGPDGAGGTTLAVLHPERGIRQWAPARQARWETQSSISLILEGSGASSPCANTTFCCKFASFPEGSWEACGSLPPSSDPGLSAPPTPAPILRADLAGILGVSGVLLFGCVYLLHLLRRHKHR

SEQ ID NO: 1560 - protein, 211 aa, Artificial Sequence
  Description of Artificial Sequence: Synthetic polypeptide
MRTEAQVPALQPPEPGLEGAMGHRTLVLPWVLLTLCVTAGTPEVWVQVRMEATELSSFTIRCGFLGSGSISLVTVSWGGPDGAGGTTLAVLHPERGIRQWAPARQARWETQSSISLILEGSGASSPCANTTFCCKFASFPEGSWEACGSLPPSSDPGLSVPPTPAPILRADLAGILGVSGVLLFDCGYLLHLLCRQKHRPAPRLQPSHTSS

SEQ ID NO: 1561 - protein, 231 aa, Artificial Sequence
  Description of Artificial Sequence: Synthetic polypeptide
MRTEAQVPALQPPEPGLEGAMGHRTLVLPWVLLTLCVTAGTPEVWVQVRMEATELSSFTIRWLSAPPTPAPILRADLAGILGVSGVLLFGCVYLLHLLRRHKHRPAPRLQPSRTSPQAPRARAWAPSQASQAALHVPYATINTSCRPATLDTAHPHGGPSWWASLPTHAAHRPQGPAAWASTPIPARGSFVSVENGLYAQAGERPPHTGPGLTLFPDPRGPRAMEGPLGVR

SEQ ID NO: 1562 - protein, 209 aa, Artificial Sequence
  Description of Artificial Sequence: Synthetic polypeptide
MRTEAQVPALQPPEPGLEGAMGHRTLVLPWVLLTLCVTAGLSAPPTPAPILRADLAGILGVSGVLLFGCVYLLHLLRRHKHRPAPRLQPSRTSPQAPRARAWAPSQASQAALHVPYATINTSCRPATLDTAHPHGGPSWWASLPTHAAHRPQGPAAWASTPIPARGSFVSVENGLYAQAGERPPHTGPGLTLFPDPRGPRAMEGPLGVR

SEQ ID NO: 1563 - protein, 94 aa, Artificial Sequence
  Description of Artificial Sequence: Synthetic polypeptide
MRTEAQVPALQPPEPGLEGAMGHRTLVLPWVLLTLCVTAGLSVPPTPAPILRADLAGILGVSGVLLFDCGYLLHLLCRQKHRPAPRLQPSHTSS

SEQ ID NO: 1564 - protein, 223 aa, Artificial Sequence
  Description of Artificial Sequence: Synthetic polypeptide
MRTEAQVPALQPPEPGLEGAMGHRTLVLPWVLLTLCVTAGTPEVWVQVRMEATELSSFTIRCGFLGSGSISLVTVSWGGPDGAGGTTLAVLHPERGIRQWAPARQARWETQSSISLILEGSGASSPCANTTFCCKFASFPEGSWEACGSLPPSSDPGGAGARGPGGQGGARELATHLILVSVPRALCPADSCPHSAGRPGRDLGGLRSPPLWLCLPPSSAAPT

SEQ ID NO: 1565 - protein, 250 aa, Artificial Sequence
  Description of Artificial Sequence: Synthetic polypeptide
MRTEAQVPALQPPEPGLEGAMGHRTLVLPWVLLTLCVTAGTPEVWVQVRMEATELSSFTIRCGFLGSGSISLVTVSWGGPDGAGGTTLAVLHPERGAQISPRGPKIGGPPCPRPGPAGKPRAASLSSWKALGPAAPAPTPPSAASLRPSQAALHVPYATINTSCRPATLDTAHPHGGPSWWASLPTHAAHRPQGPAAWASTPIPARGSFVSVENGLYAQAGERPPHTGPGLTLFPDPRGPRAMEGPLGVR

SEQ ID NO: 1566 - protein, 202 aa, Artificial Sequence
  Description of Artificial Sequence: Synthetic polypeptide
MRTEAQVPALQPPEPGLEGAMGHRTLVLPWVLLTLCVTAGTPEVWVQVRMEATELSSFTIRCGFLGSGSISLVTVSWGGPDGAGGTTLAVLHPERGIRQWAPARQARWETQSSISLILEGSGASSPCANTTFCCKFASFPGCSSRPLCHYQHQLPPSYFGHSSPPWGAVLVGVTPHPRCTPAPGPCRLGLHTHPCTWQLCLC

SEQ ID NO: 1567 - protein, 2 aa, Artificial Sequence
  Description of Artificial Sequence: Synthetic peptide
GS

SEQ ID NO: 1568 - protein, 4 aa, Artificial Sequence
  Description of Artificial Sequence: Synthetic peptide
GSGS

SEQ ID NO: 1569 - protein, 2 aa, Artificial Sequence
  Description of Artificial Sequence: Synthetic peptide
AS

SEQ ID NO: 1570 - protein, 4 aa, Artificial Sequence
  Description of Artificial Sequence: Synthetic peptide
GGGS

SEQ ID NO: 1571 - protein, 5 aa, Artificial Sequence
  Description of Artificial Sequence: Synthetic peptide
GGGGS

SEQ ID NO: 1572 - protein, 10 aa, Artificial Sequence
  Description of Artificial Sequence: Synthetic peptide
GGGGSGGGGS

SEQ ID NO: 1573 - protein, 15 aa, Artificial Sequence
  Description of Artificial Sequence: Synthetic peptide
GGGGSGGGGSGGGGS

SEQ ID NO: 1574 - protein, 20 aa, Artificial Sequence
  Description of Artificial Sequence: Synthetic peptide
GGGGSGGGGSGGGGSGGGGS

SEQ ID NO: 1575 - protein, 12 aa, Artificial Sequence
  Description of Artificial Sequence: Synthetic peptide
AGAAAKGAAAKA

SEQ ID NO: 1576 - protein, 17 aa, Artificial Sequence
  Description of Artificial Sequence: Synthetic peptide
AGAAAKGAAAKGAAAKA

SEQ ID NO: 1577 - protein, 22 aa, Artificial Sequence
  Description of Artificial Sequence: Synthetic peptide
AGAAAKGAAAKGAAAKGAAAKA

SEQ ID NO: 1578 - protein, 27 aa, Artificial Sequence
  Description of Artificial Sequence: Synthetic peptide
AGAAAKGAAAKGAAAKGAAAKGAAAKA

SEQ ID NO: 1579 - protein, 7 aa, Artificial Sequence
  Description of Artificial Sequence: Synthetic peptide
AGAAAKA

SEQ ID NO: 1580 - protein, 11 aa, Artificial Sequence
  Description of Artificial Sequence: Synthetic peptide
GSENLYFQGSG

SEQ ID NO: 1581 - protein, 12 aa, Artificial Sequence
  Description of Artificial Sequence: Synthetic peptide
AEAAAKEAAAKA

SEQ ID NO: 1582 - protein, 22 aa, Artificial Sequence
  Description of Artificial Sequence: Synthetic peptide
AEAAAKEAAAKEAAAKEAAAKA

SEQ ID NO: 1583 - protein, 14 aa, Artificial Sequence
  Description of Artificial Sequence: Synthetic peptide
GGEAAAKEAAAKGG

SEQ ID NO: 1584 - protein, 19 aa, Artificial Sequence
  Description of Artificial Sequence: Synthetic peptide
GGGGSGGGGSGAGSGGGGS

SEQ ID NO: 1585 - protein, 11 aa, Artificial Sequence
  Description of Artificial Sequence: Synthetic peptide
GGGGGSGGGGS

SEQ ID NO: 1586 - protein, 6 aa, Artificial Sequence
  Description of Artificial Sequence: Synthetic peptide
GGGGSG

SEQ ID NO: 1587 - protein, 4 aa, Artificial Sequence
  Description of Artificial Sequence: Synthetic peptide
GSGG

SEQ ID NO: 1588 - protein, 5 aa, Artificial Sequence
  Description of Artificial Sequence: Synthetic peptide
GSGGS
